(19) United States
(12) Patent Application Publication
(10) Pub. No.: US 2025/0041393 A1
(43) Pub. Date: Feb. 6, 2025

(54) POLYNUCLEOTIDES ENCODING INTEGRIN BETA-6 AND METHODS OF USE THEREOF

(71) Applicant: MODERNATX, INC., Cambridge, MA (US)

(72) Inventors: Eric Yi-Chun Huang, Boston, MA (US); Paul Stein, Watertown, MA (US); Laurie Kenney, Boston, MA (US); Michelle Dutra, Framingham, MA (US); Myoungjoo Kim, Cambridge, MA (US); Pranitha Vangala, Natick, MA (US)

(21) Appl. No.: 18/706,652

(22) PCT Filed: Nov. 1, 2022
(86) PCT No.: PCT/US2022/079095

§ 371 Date: May 1, 2024

Related U.S. Application Data
(60) Provisional application No. 63/274,211, filed on Nov. 1, 2021.

(51) Int. Cl. A61K 39/00; A61K 9/127; A61K 9/51; A61P 37/06; G01N 33/50

(52) U.S. Cl. CPC A61K 39/001; A61K 9/1271; A61K 9/5123; A61K 39/0008; A61P 37/06; G01N 33/5023; A61K 2039/53; A61K 2039/55555; G01N 2333/46; G01N 2333/70546; G01N 2333/82; G01N 2800/52

(57) ABSTRACT

The disclosure features lipid nanoparticle (LNP) compositions ITB6 molecules and uses thereof. The LNP compositions of the present disclosure comprise mRNA therapeutics encoding ITB6 polypeptides. The LNP compositions of the present disclosure can reprogram dendritic cells, suppress T cells and/or induce immune tolerance in vivo.

### CROSS REFERENCE TO RELATED APPLICATIONS

[0001] This application claims the benefit of U.S. Provisional Application No. 63/274,211, filed Nov. 1, 2021. The contents of the aforementioned application is hereby incorporated by reference in its entirety.

### BACKGROUND OF THE DISCLOSURE

[0002] Integrin β (ITGB) superfamily members play important roles in multiple biological functions, including immunosuppression.

[0003] Immune cells are considered to contribute to the development and/or progression of a wide variety of diseases, e.g., autoimmune diseases and/or inflammatory diseases. Much effort has been given to the development of therapies to suppress immune cells. However, there is an unmet need to develop therapies that can suppress immune cells for the treatment of autoimmune and/or inflammatory diseases.

### SUMMARY OF THE DISCLOSURE

[0004] The present disclosure provides, inter alia, lipid nanoparticle (LNP) compositions comprising a polynucleotide (e.g., an mRNA) encoding an ITB6 molecule and uses thereof. The LNP compositions of the present disclosure comprise nucleic acid (e.g., mRNA) therapeutics encoding an ITB6 polypeptide. In an aspect, the LNP compositions of the present disclosure can reprogram myeloid and/or dendritic cells, suppress T cells, and/or induce immune tolerance in vivo. Also disclosed herein are methods of using an LNP composition comprising a polynucleotide (e.g., an mRNA) encoding an ITB6 molecule, for treating a disease associated with an aberrant T cell function, or for inhibiting an immune response in a subject. While both ITG6 and ITB8 have similar function and can be used in the methods described herein, ITB6 was found to yield superior results when employed in the subject compositions. Additional aspects of the disclosure are described in further detail below.

[0005] In an aspect, disclosed herein is a lipid nanoparticle (LNP) composition comprising a polynucleotide comprising an mRNA which encodes an ITB6 molecule.

[0006] In another aspect, the disclosure provides a lipid nanoparticle (LNP) composition for immunomodulation, e.g., for inducing immune tolerance or reprogramming immune cells, the composition comprising a polynucleotide comprising an mRNA which encodes an ITB6 molecule.

[0007] In some embodiments, the ITB6 molecule comprises an amino acid sequence having at least 85%, 90%, 95%, 96%, 97%, 98%, 99%, or 100% identity to, or differing by no more than 1, 2, 5, 10, 15, 20, 25, 30, 40, 50, 60, 70, 80, 90, or 100 amino acids from, an amino acid sequence of ITB6 provided in Table 1A or Table 2A, e.g., any one of SEQ ID NOs: 17, 1, 7, 9, 11, 13, or 15, or a functional fragment thereof.

[0008] In some embodiments, the LNP composition comprises an amino acid sequence of any one of SEQ ID NOs: 17, 1, 7, 9, 11, 13, or 15, or a functional fragment thereof.

[0009] In some embodiments, the LNP composition comprises a nucleic acid sequence having at least 85%, 90%, 95%, 96%, 97%, 98%, 99% or 100% identity to, or differing by no more than 10, 25, 50, 100, 150, 200, 250, or 300 nucleotides from, a nucleic acid sequence of any one of SEQ ID NOs: 18, 2-6, 8, 10, 12, 14, 16, or 160-175, or a functional fragment thereof.

[0010] In some embodiments, the LNP composition results in suppression of a T cell activity and/or a T cell function (e.g., T cell anergy and/or T cell apoptosis) in a population of immune cells, e.g., as compared to a T cell activity and/or a T cell function in an otherwise similar or identical population of immune cells which has not been contacted with the LNP composition comprising a polynucleotide comprising an mRNA which encodes an ITB6 molecule.

[0011] In some embodiments, suppression of a T cell activity and/or a T cell function comprises any one, two, three, four, or all of the following:
[0012] (i) reduced level and/or activity of an effector cytokine, e.g., IFNg (e.g., secreted IFNg);
[0013] (ii) reduced T cell proliferation, survival, and/or expansion;
[0014] (iii) increased T cell apoptosis;
[0015] (iv) reduced expression and/or activity of a T cell transcription factor, e.g., T-bet; and/or
[0016] (v) increased Treg differentiation.

[0017] In some embodiments, the LNP composition results in:
[0018] (i) reduced engraftment of donor cells, e.g., donor immune cells, e.g., T cells, in a subject or host, e.g., a human, rat or mouse;
[0019] (ii) reduction in the level, activity and/or secretion of IFNg from engrafted donor immune cells, e.g., T cells, in a subject or host, e.g., a human, rat or mouse; and/or
[0020] (iii) an absence of, prevention of, or delay in the onset of, graft vs host disease (GvHD) in a subject or a host, e.g., a human, rat or mouse.

[0021] In some embodiments, the LNP composition results in amelioration or reduction of a symptom of GvHD, e.g., reduction of weight loss, host B cell depletion, and/or donor T cell engraftment, in a subject, e.g., as measured by an assay described in Example 6. In some embodiments, the LNP composition further results in Treg expansion in the subject, e.g., as measured by an assay described in Example 6.

[0022] In an aspect, disclosed herein is a pharmaceutical composition comprising an LNP comprising a polynucleotide comprising an mRNA which encodes an ITB6 molecule, e.g., as described herein.

[0023] In another aspect, the disclosure provides a method of modulating, e.g., suppressing, an immune response, comprising administering to a subject in need thereof an effective amount of a polynucleotide comprising an mRNA which encodes an ITB6 molecule, or an LNP composition comprising the same, thereby modulating the immune response.

[0024] More specifically, the subject compositions can increase Treg cell function (e.g., by increasing the number of Treg cells) and reduce T cell proliferation, thereby leading to reduction in symptoms and/or severity of autoimmune disease. In one embodiment, the increase in Treg cells occurs in an antigen-dependent manner.

[0025] In yet another aspect, provided herein is a method of treating or preventing a disease or a symptom thereof, comprises administering to a subject in need thereof an effective amount of a polynucleotide comprising an mRNA which encodes an ITB6 molecule, or an LNP composition comprising the same, thereby treating or preventing the disease.

[0026] In some embodiments, the disease is an ITB6-associated disease, e.g., a disease associated with the expression and/or an activity of ITB6. In some embodiments, the disease is a disease associated with an aberrant immune cell (e.g., T cell) function, e.g., an autoimmune disease or an inflammatory disease.

[0027] In another aspect, the disclosure provides a polynucleotide comprising an mRNA which encodes an ITB6 molecule, or an LNP composition comprising the same, for use in a method of modulating, e.g., suppressing, an immune response in a subject.

[0028] In yet another aspect, provided herein is a polynucleotide comprising an mRNA which encodes an ITB6 molecule, or an LNP composition comprising the same, for use in a method of treating or preventing a disease or a symptom thereof.

[0029] In some embodiments, the disease is an ITB6-associated disease, e.g., a disease associated with the expression and/or an activity of ITB6. In some embodiments, the disease is a disease associated with an aberrant immune cell (e.g., T cell) function, e.g., an autoimmune disease or an inflammatory disease.

[0030] In another aspect, the disclosure provides use of a polynucleotide comprising an mRNA which encodes an ITB6 molecule, or an LNP composition comprising the same, in the manufacture of a medicament for modulating, e.g., suppressing, an immune response in a subject.

[0031] In yet another aspect, provided herein is use of a polynucleotide comprising an mRNA which encodes an ITB6 molecule, or an LNP composition comprising the same, in the manufacture of a medicament for treating or preventing a disease or a symptom thereof.

[0032] In some embodiments, the disease is an ITB6-associated disease, e.g., a disease associated with the expression and/or an activity of ITB6. In some embodiments, the disease is a disease associated with an aberrant immune cell (e.g., T cell) function, e.g., an autoimmune disease or an inflammatory disease.

[0033] In another aspect, the disclosure provides use of a polynucleotide comprising an mRNA which encodes an ITB6 molecule, or an LNP composition comprising the same, for modulating, e.g., suppressing, an immune response in a subject.

[0034] In yet another aspect, provided herein is use a polynucleotide comprising an mRNA which encodes an ITB6 molecule, or an LNP composition comprising the same, for treating or preventing a disease or a symptom thereof.

[0035] In another aspect, the disclosure provides a method of assessing the responsiveness of a subject to a therapy comprising an LNP composition comprising an mRNA which encodes an ITB6 molecule, the method comprising:
[0036] (a) measuring the expression level of one or more (e.g., 2, 3, 4, or 5) biomarkers (e.g., selected from the group consisting of: PMEPA1, ITGAE/CD103, SMAD7, SKIL, and SKI) in a sample from the subject collected following administration of the therapy; and
[0037] (b) comparing the expression level in the sample with a reference expression level, wherein an increase in the expression level of the one or more biomarkers is indicative of a response to the therapy.

[0038] In some embodiments, the one or more biomarkers are one or more (e.g., 2, 3, 4, or 5) of PMEPA1, ITGAE/CD103, SMAD7, SKIL, and SKI.

[0039] In some embodiments, the level of one or more of the one or more biomarkers in the sample from the subject following treatment is at least 2-fold (e.g., at least 3-fold, 4-fold, 5-fold, 6-fold, 7-fold, 8-fold, 9-fold, or 10-fold) greater than a reference expression level of the one or more biomarkers, wherein the reference expression level comprises:
[0040] (a) the expression level of the one or more biomarkers in a sample from the subject prior to treatment with an ITB6 mRNA; or
[0041] (b) the expression level of o the one or more biomarkers in a sample from a subject who has not received the treatment with an ITB6 mRNA.

[0042] In some embodiments, where the expression level of the one or more (e.g., 2, 3, 4, or 5) biomarkers compared to a reference expression level indicates a responsiveness to the therapy (e.g., a therapy comprising an ITB6 mRNA), the method further includes administering one or more additional doses of the therapy to the subject.

[0043] In some embodiments, the disease is an ITB6-associated disease, e.g., a disease associated with the expression and/or an activity of ITB6. In some embodiments, the disease is a disease associated with an aberrant immune cell (e.g., T cell) function, e.g., an autoimmune disease or an inflammatory disease.

[0044] In another aspect, the disclosure provides use of a polynucleotide comprising an mRNA which encodes an ITB6 molecule, or an LNP composition comprising the same, as a medicament.

[0045] Additional features of any of the LNP compositions, pharmaceutical compositions comprising said LNPs, methods or compositions for use, as disclosed herein, can include the following embodiments.

[0046] In some embodiments of any of the methods disclosed herein, the LNP composition comprises a polynucleotide (e.g., mRNA) described herein. In some embodiments, the ITB6 molecule comprises a naturally occurring ITB6 molecule, a fragment of a naturally occurring ITB6 molecule, or a variant thereof. In some embodiments, the ITB6 molecule comprises an amino acid sequence having at least 85%, 90%, 95%, 96%, 97%, 98%, 99%, or 100% identity to, or differing by no more than 1, 2, 5, 10, 15, 20, 25, 30, 40, 50, 60, 70, 80, 90, or 100 amino acids from, an ITB6 amino acid sequence provided in Table 1A or Table 2A, e.g., any one of SEQ ID NOs: 17, 1, 7, 9, 11, 13, or 15, or a functional fragment thereof. In some embodiments, the ITB6 molecule comprises the amino acid sequence of an ITB6 amino acid sequence provided in Table 1A or Table 2A, e.g., any one of SEQ ID NOs: 17, 1, 7, 9, 11, 13, or 15, or a functional fragment thereof. In some embodiments, the ITB6 molecule comprises the amino acid sequence of SEQ ID NO: 17. In some embodiments, the ITB6 molecule comprises the amino acid sequence of SEQ ID NO: 1. In some embodiments, the ITB6 molecule comprises the amino acid sequence of SEQ ID NO: 7. In some embodiments, the ITB6 molecule comprises the amino acid sequence of SEQ ID NO:9. In some embodiments, the ITB6 molecule comprises the amino acid sequence of SEQ ID NO: 11. In some embodiments, the ITB6 molecule comprises the amino acid sequence of SEQ ID NO: 13. In some embodiments, the ITB6 molecule comprises the amino acid sequence of SEQ ID NO: 15.

[0047] In some embodiments, the ITB6 molecule comprises an amino acid sequence for a leader sequence and/or an affinity tag. In some embodiments, the ITB6 molecule does not comprise an amino acid sequence for a leader sequence and/or an affinity tag.

[0048] In some embodiments, the ITB6 molecule comprises an amino acid sequence having at least 85%, 90%, 95%, 96%, 97%, 98%, 99%, or 100% identity to, or differing by no more than 1, 2, 5, 10, 15, 20, 25, 30, 40, 50, 60, 70, 80, 90, or 100 amino acids from, an amino acid sequence lacking a leader sequence and/or an affinity tag (e.g., a leader sequence and/or an affinity tag described in Table 1A or Table 2A) but otherwise identical to an amino acid sequence of ITB6 provided in Table 1A or Table 2A, e.g., any one of SEQ ID NOs: 17, 1, 7, 9, 11, 13, or 15, or a functional fragment thereof.

[0049] In some embodiments, the polynucleotide (e.g., mRNA) encoding an ITB6 molecule comprises a nucleotide sequence having at least 85%, 90%, 95%, 96%, 97%, 98%, 99%, or 100% identity to, or differing by no more than 10, 25, 50, 100, 150, 200, 250, or 300 nucleotides from, the nucleotide sequence of any one of SEQ ID NOs: 18, 2-6, 8, 10, 12, 14, 16, or 160-175, or a functional fragment thereof. In some embodiments, the polynucleotide (e.g., mRNA) encoding an ITB6 molecule comprises a nucleotide sequence of any one of SEQ ID NOs: 18, 2-6, 8, 10, 12, 14, 16, or 160-175, or a functional fragment thereof.

[0050] In some embodiments, the polynucleotide (e.g., mRNA) encoding the ITB6 molecule comprises a nucleotide sequence having at least 85%, 90%, 95%, 96%, 97%, 98%, 99%, or 100% identity to, or differing by no more than 10, 25, 50, 100, 150, 200, 250, or 300 nucleotides from, the nucleotide sequence of SEQ ID NO: 18. In some embodiments, the polynucleotide (e.g., mRNA) encoding the ITB6 molecule comprises the nucleotide sequence of SEQ ID NO: 18. In some embodiments, the polynucleotide (e.g., mRNA) encoding the ITB6 molecule comprises the nucleotide sequence of SEQ ID NO: 175, which comprises from 5′ to 3′ end: the 5′ UTR sequence of SEQ ID NO: 50, the ORF sequence of SEQ ID NO:18, and the 3′ UTR sequence of SEQ ID NO: 142.

[0051] In some embodiments, the polynucleotide (e.g., mRNA) encoding the ITB6 molecule comprises a nucleotide sequence having at least 85%, 90%, 95%, 96%, 97%, 98%, 99%, or 100% identity to, or differing by no more than 10, 25, 50, 100, 150, 200, 250, or 300 nucleotides from, the nucleotide sequence of SEQ ID NO: 2. In some embodiments, the polynucleotide (e.g., mRNA) encoding the ITB6 molecule comprises the nucleotide sequence of SEQ ID NO: 2. In some embodiments, the polynucleotide (e.g., mRNA) encoding the ITB6 molecule comprises the nucleotide sequence of SEQ ID NO: 160, which comprises from 5′ to 3′ end: the 5′ UTR sequence of SEQ ID NO: 56, the ORF sequence of SEQ ID NO: 2, and the 3′ UTR sequence of SEQ ID NO: 110.

[0052] In some embodiments, the polynucleotide (e.g., mRNA) encoding the ITB6 molecule comprises a nucleotide sequence having at least 85%, 90%, 95%, 96%, 97%, 98%, 99%, or 100% identity to, or differing by no more than 10, 25, 50, 100, 150, 200, 250, or 300 nucleotides from, the nucleotide sequence of SEQ ID NO: 3. In some embodiments, the polynucleotide (e.g., mRNA) encoding the ITB6 molecule comprises the nucleotide sequence of SEQ ID NO: 3. In some embodiments, the polynucleotide (e.g., mRNA) encoding the ITB6 molecule comprises the nucleotide sequence of SEQ ID NO: 161, which comprises from 5′ to 3′ end: the 5′ UTR sequence of SEQ ID NO: 50, the ORF sequence of SEQ ID NO: 3, and the 3′ UTR sequence of SEQ ID NO: 110.

[0053] In some embodiments, the polynucleotide (e.g., mRNA) encoding the ITB6 molecule comprises a nucleotide sequence having at least 85%, 90%, 95%, 96%, 97%, 98%, 99%, or 100% identity to, or differing by no more than 10, 25, 50, 100, 150, 200, 250, or 300 nucleotides from, the nucleotide sequence of SEQ ID NO: 4. In some embodiments, the polynucleotide (e.g., mRNA) encoding the ITB6 molecule comprises the nucleotide sequence of SEQ ID NO: 4. In some embodiments, the polynucleotide (e.g., mRNA) encoding the ITB6 molecule comprises the nucleotide sequence of SEQ ID NO: 162, which comprises from 5′ to 3′ end: the 5′ UTR sequence of SEQ ID NO: 50, ORF sequence of SEQ ID NO: 4, and the 3′ UTR sequence of SEQ ID NO: 143.

[0054] In some embodiments, the polynucleotide (e.g., mRNA) encoding the ITB6 molecule comprises a nucleotide sequence having at least 85%, 90%, 95%, 96%, 97%, 98%, 99%, or 100% identity to, or differing by no more than 10, 25, 50, 100, 150, 200, 250, or 300 nucleotides from, the nucleotide sequence of SEQ ID NO: 5. In some embodiments, the polynucleotide (e.g., mRNA) encoding the ITB6 molecule comprises the nucleotide sequence of SEQ ID NO: 5. In some embodiments, the polynucleotide (e.g., mRNA) encoding the ITB6 molecule comprises the nucleotide sequence of SEQ ID NO: 163, which comprises from 5′ to 3′ end: the 5′ UTR sequence of SEQ ID NO: 50, the ORF sequence of SEQ ID NO: 5, and the 3′ UTR sequence of SEQ ID NO: 110. In some embodiments, the polynucleotide (e.g., mRNA) encoding the ITB6 molecule comprises the nucleotide sequence of SEQ ID NO: 164, which comprises from 5′ to 3′ end: the 5′ UTR sequence of SEQ ID NO: 50, the ORF sequence of SEQ ID NO: 5, and the 3′ UTR sequence of SEQ ID NO: 144.

[0055] In some embodiments, the polynucleotide (e.g., mRNA) encoding the ITB6 molecule comprises the nucleotide sequence of SEQ ID NO: 169, which comprises from 5′ to 3′ end: the 5′ UTR sequence of SEQ ID NO: 50, the ORF sequence of SEQ ID NO: 5, and the 3′ UTR sequence of SEQ ID NO: 145.

[0056] In some embodiments, the polynucleotide (e.g., mRNA) encoding the ITB6 molecule comprises a nucleotide sequence having at least 85%, 90%, 95%, 96%, 97%, 98%, 99%, or 100% identity to, or differing by no more than 10, 25, 50, 100, 150, 200, 250, or 300 nucleotides from, the nucleotide sequence of SEQ ID NO: 6. In some embodiments, the polynucleotide (e.g., mRNA) encoding the ITB6 molecule comprises the nucleotide sequence of SEQ ID NO: 6. In some embodiments, the polynucleotide (e.g., mRNA) encoding the ITB6 molecule comprises the nucleotide sequence of SEQ ID NO: 165, which comprises from 5′ to 3′ end: the 5′ UTR sequence of SEQ ID NO: 50, the ORF sequence of SEQ ID NO: 6, and the 3′ UTR sequence of SEQ ID NO: 110. In some embodiments, the polynucleotide (e.g., mRNA) encoding the ITB6 molecule comprises the nucleotide sequence of SEQ ID NO: 166, which comprises from 5′ to 3′ end: the 5′ UTR sequence of SEQ ID NO: 50, the ORF sequence of SEQ ID NO: 6, and the 3′ UTR sequence of SEQ ID NO: 110. In some embodiments, the polynucleotide (e.g., mRNA) encoding the ITB6 molecule comprises the nucleotide sequence of SEQ ID NO: 167, which comprises from 5′ to 3′ end: the 5′ UTR sequence of SEQ ID NO: 50, the ORF sequence of SEQ ID NO: 6, and the 3′ UTR sequence of SEQ ID NO: 145. In some embodiments, the polynucleotide (e.g., mRNA) encoding the ITB6 molecule comprises the nucleotide sequence of SEQ ID NO: 168, which comprises from 5′ to 3′ end: the 5′ UTR sequence of SEQ ID NO: 50, the ORF sequence of SEQ ID NO: 6, and the 3′ UTR sequence of SEQ ID NO: 143.

[0057] In some embodiments, the polynucleotide (e.g., mRNA) encoding the ITB6 molecule comprises a nucleotide sequence having at least 85%, 90%, 95%, 96%, 97%, 98%, 99%, or 100% identity to, or differing by no more than 10, 25, 50, 100, 150, 200, 250, or 300 nucleotides from, the nucleotide sequence of SEQ ID NO: 8. In some embodiments, the polynucleotide (e.g., mRNA) encoding the ITB6 molecule comprises the nucleotide sequence of SEQ ID NO: 8. In some embodiments, the polynucleotide (e.g., mRNA) encoding the ITB6 molecule comprises the nucleotide sequence of SEQ ID NO: 170, which comprises from 5′ to 3′ end: the 5′ UTR sequence of SEQ ID NO: 50, the ORF sequence of SEQ ID NO: 8, and the 3′ UTR sequence of SEQ ID NO: 110.

[0058] In some embodiments, the polynucleotide (e.g., mRNA) encoding the ITB6 molecule comprises a nucleotide sequence having at least 85%, 90%, 95%, 96%, 97%, 98%, 99%, or 100% identity to, or differing by no more than 10, 25, 50, 100, 150, 200, 250, or 300 nucleotides from, the nucleotide sequence of SEQ ID NO: 10. In some embodiments, the polynucleotide (e.g., mRNA) encoding the ITB6 molecule comprises the nucleotide sequence of SEQ ID NO: 10. In some embodiments, the polynucleotide (e.g., mRNA) encoding the ITB6 molecule comprises the nucleotide sequence of SEQ ID NO: 171, which comprises from 5′ to 3′ end: the 5′ UTR sequence of SEQ ID NO: 50, the ORF sequence of SEQ ID NO: 10, and the 3′ UTR sequence of SEQ ID NO: 110.

[0059] In some embodiments, the polynucleotide (e.g., mRNA) encoding the ITB6 molecule comprises a nucleotide sequence having at least 85%, 90%, 95%, 96%, 97%, 98%, 99%, or 100% identity to, or differing by no more than 10, 25, 50, 100, 150, 200, 250, or 300 nucleotides from, the nucleotide sequence of SEQ ID NO: 12. In some embodiments, the polynucleotide (e.g., mRNA) encoding the ITB6 molecule comprises the nucleotide sequence of SEQ ID NO: 12. In some embodiments, the polynucleotide (e.g., mRNA) encoding the ITB6 molecule comprises the nucleotide sequence of SEQ ID NO: 172, which comprises from 5′ to 3′ end: the 5′ UTR sequence of SEQ ID NO: 50, the ORF sequence of SEQ ID NO: 12, and the 3′ UTR sequence of SEQ ID NO: 110.

[0060] In some embodiments, the polynucleotide (e.g., mRNA) encoding the ITB6 molecule comprises a nucleotide sequence having at least 85%, 90%, 95%, 96%, 97%, 98%, 99%, or 100% identity to, or differing by no more than 10, 25, 50, 100, 150, 200, 250, or 300 nucleotides from, the sequence of SEQ ID NO: 14. In some embodiments, the polynucleotide (e.g., mRNA) encoding the ITB6 molecule comprises the nucleotide sequence of SEQ ID NO: 14. In some embodiments, the polynucleotide (e.g., mRNA) encoding the ITB6 molecule comprises the nucleotide sequence of SEQ ID NO: 173, which comprises from 5′ to 3′ end: the 5′ UTR sequence of SEQ ID NO: 50, the ORF sequence of SEQ ID NO: 14, and the 3′ UTR sequence of SEQ ID NO: 110.

[0061] In some embodiments, the polynucleotide (e.g., mRNA) encoding the ITB6 molecule comprises a nucleotide sequence having at least 85%, 90%, 95%, 96%, 97%, 98%, 99%, or 100% identity to, or differing by no more than 10, 25, 50, 100, 150, 200, 250, or 300 nucleotides from, the nucleotide sequence of SEQ ID NO: 16. In some embodiments, the polynucleotide (e.g., mRNA) encoding the ITB6 molecule comprises the nucleotide sequence of SEQ ID NO: 16. In some embodiments, the polynucleotide (e.g., mRNA) encoding the ITB6 molecule comprises the nucleotide sequence of SEQ ID NO: 174, which comprises from 5′ to 3′ end: the 5′ UTR sequence of SEQ ID NO: 56, the ORF sequence of SEQ ID NO: 16, and the 3′ UTR sequence of SEQ ID NO: 110.

[0062] In some embodiments, the polynucleotide (e.g., mRNA) encoding the ITB6 molecule comprises the nucleotide sequence of any of ITB6 human variant 5.1, human variant 1.1, human variant 1.2, human variant 1.3, human variant 1.4, human variant 1.5, human variant 1.6, human variant 1.7, human variant 1.8, human variant 1.9, human variant 1.10, human variant 2.1, human variant 3.1, or human variant 4.1, rat variant 1.1, or mouse variant 1.1, as described in Table 2A.

[0063] In some embodiments, the polynucleotide (e.g., mRNA) encoding the ITB6 molecule comprises a nucleotide sequence that encodes for a leader sequence and/or an affinity tag. In some embodiments, the polynucleotide (e.g., mRNA) encoding the ITB6 molecule does not comprise a nucleotide sequence that encodes for a leader sequence and/or an affinity tag.

[0064] In some embodiments, the polynucleotide (e.g., mRNA) encoding the ITB6 molecule comprises a nucleic acid sequence having at least 85%, 90%, 95%, 96%, 97%, 98%, 99% or 100% identity to, or differing by no more than 10, 25, 50, 100, 150, 200, 250, or 300 nucleotides from, a nucleic acid sequence lacking a nucleotide sequence that encodes for a leader sequence and/or an affinity tag (e.g., a leader sequence and/or an affinity tag described in Table 1A or Table 2A) but otherwise identical to the nucleotide sequence of any one of SEQ ID NOs: 18, 2-6, 8, 10, 12, 14, 16, or 160-175, or a functional fragment thereof.

[0065] In some embodiments, the polynucleotide (e.g., mRNA) comprises at least one chemical modification. In some embodiments, the chemical modification is selected from the group consisting of pseudouridine, N1-methylpseudouridine, 2-thiouridine, 4′-thiouridine, 5-methylcytosine, 2-thio-1-methyl-1-deaza-pseudouridine, 2-thio-1-methyl-pseudouridine, 2-thio-5-aza-uridine, 2-thio-dihydropseudouridine, 2-thio-dihydrouridine, 2-thio-pseudouridine, 4-methoxy-2-thio-pseudouridine, 4-methoxy-pseudouridine, 4-thio-1-methyl-pseudouridine, 4-thio-pseudouridine, 5-aza-uridine, dihydropseudouridine, 5-methyluridine, 5-methyluridine, 5-methoxyuridine, and 2′-O-methyl uridine. In some embodiments, the chemical modification is selected from the group consisting of pseudouridine, N1-methylpseudouridine, 5-methylcytosine, 5-methoxyuridine, and a combination thereof. In some embodiments, the chemical modification is N1-methylpseudouridine. In some embodiments, each mRNA in the lipid nanoparticle comprises fully modified N1-methylpseudouridine.

[0066] In some embodiments of any of the methods disclosed herein, the LNP composition is an LNP composition described herein. In some embodiments, the LNP composition comprises: (i) an ionizable lipid, e.g., an amino lipid; (ii) a sterol or other structural lipid; (iii) a non-cationic helper lipid or phospholipid; and (iv) a PEG-lipid.

[0067] In some embodiments, the LNP composition comprises an ionizable lipid comprising an amino lipid. In some embodiments, the ionizable lipid comprises a compound of any of Formulae (I), (I-a), (I-b), (I-c), (II), (II-a), (II-b), (II-c), (II-d), (II-e), (II-f), (II-g), (II-h), or (III). In an embodiment, the ionizable lipid comprises a compound of Formula (I). In an embodiment, the ionizable lipid comprises Compound 18. In an embodiment, the ionizable lipid comprises Compound 25.

[0068] In some embodiments, the lipid nanoparticle comprises a compound of Formula (I):

[chemical structure]

or a salt or isomer thereof,
[0069] wherein R′^{a} is R′^{branched}, wherein
   [0070] R′^{branched} is:

[chemical structure]

wherein

[chemical structure]

denotes a point of attachment;
[0071] wherein R^{aα}, R^{aβ}, R^{aγ}, and R^{aδ} are each independently selected from the group consisting of H, C₂₋₁₂ alkyl, and C₂₋₁₂ alkenyl;
[0072] R² and R³ are each independently selected from the group consisting of C₁₋₁₄ alkyl and C₂₋₁₄ alkenyl;
[0073] R⁴ is selected from the group consisting of —(CH₂)ₙOH, wherein n is selected from the group consisting of 1, 2, 3, 4, and 5, and

[chemical structure]

[0074] wherein

[chemical structure]

denotes a point of attachment; wherein
[0075] R¹⁰ is N(R)₂; each R is independently selected from the group consisting of C₁₋₆ alkyl, C₂₋₃ alkenyl, and H; and n2 is selected from the group consisting of 1, 2, 3, 4, 5, 6, 7, 8, 9, and 10;
[0076] each R⁵ is independently selected from the group consisting of C₁₋₃ alkyl, C₂₋₃ alkenyl, and H;
[0077] each R⁶ is independently selected from the group consisting of C₁₋₃ alkyl, C₂₋₃ alkenyl, and H;
[0078] M and M′ are each independently selected from the group consisting of —C(O)O— and —OC(O)—;
[0079] R′ is a C₁₋₁₂ alkyl or C₂₋₁₂ alkenyl;
[0080] l is selected from the group consisting of 1, 2, 3, 4, and 5; and
[0081] m is selected from the group consisting of 5, 6, 7, 8, 9, 10, 11, 12, and 13.

[0082] In some embodiments, the compound of Formula (I) is selected from:

[chemical structure]

[0083] In some embodiments, the lipid nanoparticle further comprises a phospholipid, a structural lipid, and a PEG-lipid.

[0084] In some embodiments, the PEG-lipid is Compound I.

[0085] In some embodiments, the lipid nanoparticle comprises:
[0086] (i) 40-50 mol % of the compound of Formula (I), 30-45 mol % of the structural lipid, 5-15 mol % of the phospholipid, and 1-5 mol % of the PEG-lipid; or
[0087] (ii) 45-50 mol % of the compound of Formula (I), 35-45 mol % of the structural lipid, 8-12 mol % of the phospholipid, and 1.5 to 3.5 mol % of the PEG-lipid.

[0088] In some embodiments, the lipid nanoparticle comprises:
[0089] (i) Compound 18, (ii) Cholesterol, and (iii) PEG-DMG or Compound VI;
[0090] (i) Compound 25, (ii) Cholesterol, and (iii) PEG-DMG or Compound VI;
[0091] (i) Compound 301, (ii) Cholesterol, and (iii) PEG-DMG or Compound VI;
[0092] (i) Compound 357, (ii) Cholesterol, and (iii) PEG-DMG or Compound VI;
[0093] (i) Compound 18, (ii) DSPC or DOPE, (iii) Cholesterol, and (iv) PEG-DMG or Compound VI;
[0094] (i) Compound 25, (ii) DSPC or DOPE, (iii) Cholesterol, and (iv) PEG-DMG or Compound VI;
[0095] (i) Compound 301, (ii) DSPC or DOPE, (iii) Cholesterol, and (iv) PEG-DMG or Compound VI;
[0096] (i) Compound 357, (ii) DSPC or DOPE, (iii) Cholesterol, and (iv) PEG-DMG or Compound VI.

[0097] In some embodiments, the LNP comprises about 20 mol % to about 60 mol % ionizable lipid, about 5 mol % to about 25 mol % non-cationic helper lipid or phospholipid, about 25 mol % to about 55 mol % sterol or other structural lipid, and about 0.5 mol % to about 15 mol % PEG lipid. In some embodiments, the LNP comprises about 35 mol % to about 55 mol % ionizable lipid, about 5 mol % to about 25 mol % non-cationic helper lipid or phospholipid, about 30 mol % to about 40 mol % sterol or other structural lipid, and about 0 mol % to about 10 mol % PEG lipid. In some embodiments, the LNP comprises about 50 mol % ionizable lipid, about 10 mol % non-cationic helper lipid or phospholipid, about 38.5 mol % sterol or other structural lipid, and about 1.5 mol % PEG lipid. In some embodiments, the LNP comprises about 49.83 mol % ionizable lipid, about 9.83 mol % non-cationic helper lipid or phospholipid, about 30.33 mol % sterol or other structural lipid, and about 2.0 mol % PEG lipid.

[0098] In some embodiments, the polynucleotide (e.g., a RNA, e.g., a mRNA) disclosed herein is formulated with a delivery agent comprising, e.g., a compound having the Formula (II). In some embodiments, the delivery agent comprises an ionizable amino lipid, a helper lipid (e.g., DSPC), a sterol (e.g., Cholesterol), and a PEG lipid (e.g., Compound VI or PEG-DMG), e.g., with a mole ratio in the range of about (i) 40-50 mol % ionizable amino lipid, optionally 45-50 mol % ionizable amino lipid, for example, 45-46 mol %, 46-47 mol %, 47-48 mol %, 48-49 mol %, or 49-50 mol % for example about 45 mol %, 45.5 mol %, 46 mol %, 46.5 mol %, 47 mol %, 47.5 mol %, 48 mol %, 48.5 mol %, 49 mol %, or 49.5 mol %; (ii) 30-45 mol % sterol (e.g., cholesterol), optionally 35-42 mol % sterol, for example, 30-31 mol %, 31-32 mol %, 32-33 mol %, 33-34 mol %, 35-35 mol %, 35-36 mol %, 36-37 mol %, 37-38 mol %, 38-39 mol %, or 39-40 mol %, or 40-42 mol % sterol; (iii) 5-15 mol % helper lipid (e.g., DSPC), optionally 10-15 mol % helper lipid, for example, 5-6 mol %, 6-7 mol %, 7-8 mol %, 8-9 mol %, 9-10 mol %, 10-11 mol %, 11-12 mol %, 12-13 mol %, 13-14 mol %, or 14-15 mol % helper lipid; and (iv) 1-5% PEG lipid (e.g., Compound I or PEG-DMG), optionally 1-5 mol % PEG lipid, for example 1.5 to 2.5 mol %, 1-2 mol %, 2-3 mol %, 3-4 mol %, or 4-5 mol % PEG lipid. In some embodiments, the delivery agent comprises an ionizable amino lipid, Cholesterol, DSPC, and Compound I with a mole ratio of 47:39:11:3.

[0099] In some embodiments of any of the LNP compositions, methods or compositions for use disclosed herein, the LNP comprises about 45 mol % to about 50 mol % ionizable lipid. In some embodiments, the LNP comprises about 45.5 mol % to about 49.5 mol % ionizable lipid. In some embodiments, the LNP comprises about 46 mol % to about 49 mol % ionizable lipid. In some embodiments, the LNP comprises about 46.5 mol % to about 48.5 mol % ionizable lipid. In some embodiments, the LNP comprises about 47 mol % to about 48 mol % ionizable lipid.

[0100] In some embodiments, the LNP comprises about 45 mol % to about 49.5 mol % ionizable lipid. In some embodiments, the LNP comprises about 45 mol % to about 49 mol % ionizable lipid. In some embodiments, the LNP comprises about 45 mol % to about 48.5 mol % ionizable lipid. In some embodiments, the LNP comprises about 45 mol % to about 48 mol % ionizable lipid. In some embodiments, the LNP comprises about 45 mol % to about 47.5 mol % ionizable lipid. In some embodiments, the LNP comprises about 45 mol % to about 47 mol % ionizable lipid. In some embodiments, the LNP comprises about 45 mol % to about 46.5 mol % ionizable lipid. In some embodiments, the LNP comprises about 45 mol % to about 46 mol % ionizable lipid. In some embodiments, the LNP comprises about 45 mol % to about 45.5 mol % ionizable lipid.

[0101] In some embodiments, the LNP comprises about 45.5 mol % to about 50 mol % ionizable lipid. In some embodiments, the LNP comprises about 46 mol % to about 50 mol % ionizable lipid. In some embodiments, the LNP comprises about 46.5 mol % to about 50 mol % ionizable lipid. In some embodiments, the LNP comprises about 47 mol % to about 50 mol % ionizable lipid. In some embodiments, the LNP comprises about 47.5 mol % to about 50 mol % ionizable lipid. In some embodiments, the LNP comprises about 48 mol % to about 50 mol % ionizable lipid. In some embodiments, the LNP comprises about 48.5 mol % to about 50 mol % ionizable lipid. In some embodiments, the LNP comprises about 49 mol % to about 50 mol % ionizable lipid. In some embodiments, the LNP comprises about 49.5 mol % to about 50 mol % ionizable lipid.

[0102] In some embodiments, the LNP comprises about 45 mol % to about 46 mol % ionizable lipid. In some embodiments, the LNP comprises about 45.5 mol % to about 46.5 mol % ionizable lipid. In some embodiments, the LNP comprises about 46 mol % to about 47 mol % ionizable lipid. In some embodiments, the LNP comprises about 46.5 mol % to about 47.5 mol % ionizable lipid. In some embodiments, the LNP comprises about 47 mol % to about 48 mol % ionizable lipid. In some embodiments, the LNP comprises about 47.5 mol % to about 48.5 mol % ionizable lipid. In some embodiments, the LNP comprises about 48 mol % to about 49 mol % ionizable lipid. In some embodiments, the LNP comprises about 48.5 mol % to about 49.5 mol % ionizable lipid. In some embodiments, the LNP comprises about 49 mol % to about 50 mol % ionizable lipid.

[0103] In some embodiments, the LNP comprises about 45 mol % ionizable lipid. In some embodiments, the LNP comprises about 45.5 mol % ionizable lipid. In some embodiments, the LNP comprises about 46 mol % ionizable lipid. In some embodiments, the LNP comprises about 46.5 mol % ionizable lipid. In some embodiments, the LNP comprises about 47 mol % ionizable lipid. In some embodiments, the LNP comprises about 47.5 mol % ionizable lipid. In some embodiments, the LNP comprises about 48 mol % ionizable lipid. In some embodiments, the LNP comprises about 48.5 mol % ionizable lipid. In some embodiments, the LNP comprises about 49 mol % ionizable lipid. In some embodiments, the LNP comprises about 49.5 mol % ionizable lipid. In some embodiments, the LNP comprises about 50 mol % ionizable lipid.

[0104] In some embodiments, the LNP comprises about 1 mol % to about 5 mol % PEG lipid. In some embodiments, the LNP comprises about 1.5 mol % to about 4.5 mol % PEG lipid. In some embodiments, the LNP comprises about 2 mol % to about 4 mol % PEG lipid. In some embodiments, the LNP comprises about 2.5 mol % to about 3.5 mol % PEG lipid.

[0105] In some embodiments, the LNP comprises about 1 mol % to about 4.5 mol % PEG lipid. In some embodiments, the LNP comprises about 1 mol % to about 4 mol % PEG lipid. In some embodiments, the LNP comprises about 1 mol % to about 3.5 mol % PEG lipid. In some embodiments, the LNP comprises about 1 mol % to about 3 mol % PEG lipid. In some embodiments, the LNP comprises about 1 mol % to about 2.5 mol % PEG lipid. In some embodiments, the LNP comprises about 1 mol % to about 2 mol % PEG lipid. In some embodiments, the LNP comprises about 1 mol % to about 1.5 mol % PEG lipid.

[0106] In some embodiments, the LNP comprises about 1.5 mol % to about 5 mol % PEG lipid. In some embodiments, the LNP comprises about 2 mol % to about 5 mol % PEG lipid. In some embodiments, the LNP comprises about 2.5 mol % to about 5 mol % PEG lipid. In some embodiments, the LNP comprises about 3 mol % to about 5 mol % PEG lipid. In some embodiments, the LNP comprises about 3.5 mol % to about 5 mol % PEG lipid. In some embodiments, the LNP comprises about 4 mol % to about 5 mol % PEG lipid. In some embodiments, the LNP comprises about 4.5 mol % to about 5 mol % PEG lipid.

[0107] In some embodiments, the LNP comprises about 1 mol % to about 2 mol % PEG lipid. In some embodiments, the LNP comprises about 1.5 mol % to about 2.5 mol % PEG lipid. In some embodiments, the LNP comprises about 2 mol % to about 3 mol % PEG lipid. In some embodiments, the LNP comprises about 3.5 mol % to about 4.5 mol % PEG lipid. In some embodiments, the LNP comprises about 4 mol % to about 5 mol % PEG lipid.

[0108] In some embodiments, the LNP comprises about 1 mol % PEG lipid. In some embodiments of the LNPs or methods of the disclosure, the LNP comprises about 1.5 mol % PEG lipid. In some embodiments of the LNPs or methods of the disclosure, the LNP comprises about 2 mol % PEG lipid. In some embodiments of the LNPs or methods of the disclosure, the LNP comprises about 2.5 mol % PEG lipid. In some embodiments of the LNPs or methods of the disclosure, the LNP comprises about 3 mol % PEG lipid. In some embodiments of the LNPs or methods of the disclosure, the LNP comprises about 3.5 mol % PEG lipid. In some embodiments of the LNPs or methods of the disclosure, the LNP comprises about 4 mol % PEG lipid. In some embodiments of the LNPs or methods of the disclosure, the LNP comprises about 4.5 mol % PEG lipid. In some embodiments of the LNPs or methods of the disclosure, the LNP comprises about 5 mol % PEG lipid.

[0109] In some embodiments of the LNPs or methods of the disclosure, the LNP comprises about 50 mol % Compound 18 and about 10 mol % non-cationic helper lipid or phospholipid. In some embodiments of the LNPs or methods of the disclosure, the LNP comprises 50 mol % Compound 18 and about 10 mol % non-cationic helper lipid or phospholipid. In some embodiments of the LNPs or methods of the disclosure, the LNP comprises about 50 mol % Compound 18 and 10 mol % non-cationic helper lipid or phospholipid. In some embodiments of the LNPs or methods of the disclosure, the LNP comprises 50 mol % Compound 18 and 10 mol % non-cationic helper lipid or phospholipid. In some embodiments of the LNPs or methods of the disclosure, the LNP comprises about 49.83 mol % Compound 18, about 9.83 mol % non-cationic helper lipid or phospholipid, about 30.33 mol % sterol or other structural lipid, and about 2.0 mol % PEG lipid.

[0110] In some embodiments of the LNPs or methods of the disclosure, the LNP comprises about 50 mol % Compound 25 and about 10 mol % non-cationic helper lipid or phospholipid. In some embodiments of the LNPs or methods of the disclosure, the LNP comprises 50 mol % Compound 25 and about 10 mol % non-cationic helper lipid or phospholipid. In some embodiments of the LNPs or methods of the disclosure, the LNP comprises about 50 mol % Compound 25 and 10 mol % non-cationic helper lipid or phospholipid. In some embodiments of the LNPs or methods of the disclosure, the LNP comprises 50 mol % Compound 25 and 10 mol % non-cationic helper lipid or phospholipid. In some embodiments of the LNPs or methods of the disclosure, the LNP comprises about 49.83 mol % Compound 25, about 9.83 mol % non-cationic helper lipid or phospholipid, about 30.33 mol % sterol or other structural lipid, and about 2.0 mol % PEG lipid.

[0111] In some embodiments, the LNP is formulated for intravenous, subcutaneous, intramuscular, intraocular, intranasal, rectal, or oral delivery. In some embodiments, the LNP is formulated for intravenous delivery. In some embodiments, the LNP is formulated for subcutaneous delivery. In some embodiments, the LNP is formulated for intramuscular delivery. In some embodiments, the LNP is formulated for intraocular delivery. In some embodiments, the LNP is formulated for intranasal delivery. In some embodiments, the LNP is formulated for rectal delivery. In some embodiments, the LNP is formulated for oral delivery.

[0112] In some embodiments, the disease associated with an aberrant immune cell (e.g., T cell) function is an autoimmune disease, or a disease with hyper-activated immune function. In some embodiments, the disease is an autoimmune disease. In some embodiments, the autoimmune disease e.g., rheumatoid arthritis (RA); graft versus host disease (GVHD) (e.g., acute GVHD or chronic GVHD); diabetes, e.g., Type 1 diabetes; inflammatory bowel disease (IBD); lupus (e.g., systemic lupus erythematosus (SLE)), multiple sclerosis; autoimmune hepatitis (e.g., Type 1 or Type 2); primary biliary cholangitis; organ transplant associated rejection; psoriasis; or polymyositis (also known as dermatomyositis).

[0113] In some embodiments, the autoimmune disease is rheumatoid arthritis (RA). In some embodiments, the autoimmune disease is graft versus host disease (GVHD) (e.g., acute GVHD or chronic GVHD). In some embodiments, the autoimmune disease is diabetes, e.g., Type 1 diabetes. In some embodiments, the autoimmune disease is inflammatory bowel disease (IBD). In some embodiments, IBD comprises colitis, ulcerative colitis or Crohn's disease. In some embodiments, the autoimmune disease is lupus, e.g., systemic lupus erythematosus (SLE). In some embodiments, the autoimmune disease is multiple sclerosis. In some embodiments, the autoimmune disease is autoimmune hepatitis, e.g., Type 1 or Type 2. In some embodiments, the autoimmune disease is primary biliary cholangitis.

[0114] In some embodiments, the autoimmune disease is organ transplant associated rejection. In some embodiments, an organ transplant associated rejection comprises allograft rejection; e.g., renal transplant rejection; liver transplant rejection; bone marrow transplant rejection; or stem cell transplant rejection. In some embodiments, a stem cell transplant comprises a transplant of any one or all of the following types of cells: stem cells, cord blood stem cells, hematopoietic stem cells, embryonic stem cells, cells derived from or comprising mesenchymal stem cells, and/or induced stem cells (e.g., induced pluripotent stem cells). In some embodiments, the stem cell comprises a pluripotent stem cell.

[0115] In some embodiments of any of the methods or compositions for use disclosed herein, the subject is a mammal, e.g., a human.

[0116] Additional features of any of the aforesaid polynucleotides, LNP compositions, or methods of using said polynucleotides or LNP compositions, include one or more of the following enumerated embodiments. Those skilled in the art will recognize or be able to ascertain using no more than routine experimentation, many equivalents to the specific embodiments of the invention described herein. Such equivalents are intended to be encompassed by the following enumerated embodiments.

### Other Embodiments of the Disclosure

[0117] E1. A lipid nanoparticle (LNP) composition comprising a polynucleotide comprising an mRNA which encodes an ITB6 molecule.

[0118] E2. An LNP composition for immunomodulation, e.g., for inhibiting an immune response, the composition comprising a polynucleotide comprising an mRNA which encodes an ITB6 molecule.

[0119] E3. The LNP composition of embodiment any one of E1-E2, wherein the ITB6 molecule comprises a naturally occurring ITB6 molecule, a fragment of a naturally occurring ITB6 molecule, or a variant thereof.

[0120] E4. The LNP composition of any one of embodiments E1-E3, wherein the ITB6 molecule comprises an amino acid sequence having at least 85%, 90%, 95%, 96%, 97%, 98%, 99% or 100% identity, or differing by no more than 1, 2, 5, 10, 15, 20, 25, 30, 40, 50, 60, 70, 80, 90, or 100 amino acids from, an ITB6 amino acid sequence provided in Table 1A or Table 2A, e.g., any one of SEQ ID NOs: 17, 1, 7, 9, 11, 13, or 15, or a functional fragment thereof.

[0121] E5. The LNP composition of any one of embodiments E1-E4, wherein the ITB6 molecule comprises the amino acid sequence of any one of SEQ ID NOs: 17, 1, 7, 9, 11, 13, or 15, or a functional fragment thereof.

[0122] E6. The LNP composition of any one of embodiments E1-E4, wherein the polynucleotide encoding the ITB6 molecule comprises a nucleotide sequence having at least 85%, 90%, 95%, 96%, 97%, 98%, 99% or 100% identity to, or differing by no more than 10, 25, 50, 100, 150, 200, 250, or 300 nucleotides from, an ITB6 nucleotide sequence provided in Table 1A or Table 2A, e.g., any one of SEQ ID NOs: 18, 2-6, 8, 10, 12, 14, 16, or 60-160-175, or a functional fragment thereof.

[0123] E7. The LNP composition of any one of embodiments E1-E6, wherein the polynucleotide encoding the ITB6 molecule comprises:
[0124] (I) (a) a nucleotide sequence having at least 85%, 90%, 95%, 96%, 97%, 98%, 99% or 100% identity to, or differing by no more than 10, 25, 50, 100, 150, 200, 250, or 300 nucleotides from, the nucleotide sequence of SEQ ID NO: 2 or a functional fragment thereof; (b) the nucleotide sequence of SEQ ID NO: 2 or a functional fragment thereof; or (c) the nucleotide sequence of SEQ ID NO: 160, which comprises from 5′ to 3′ end: the 5′ UTR sequence of SEQ ID NO: 56, the ORF sequence of SEQ ID NO: 2, and the 3′ UTR sequence of SEQ ID NO: 110;
[0125] (II) (a) a nucleotide sequence having at least 85%, 90%, 95%, 96%, 97%, 98%, 99% or 100% identity to, or differing by no more than 10, 25, 50, 100, 150, 200, 250, or 300 nucleotides from, the nucleotide sequence of SEQ ID NO: 3 or a functional fragment thereof; (b) the nucleotide sequence of SEQ ID NO: 3 or a functional fragment thereof; or (c) the nucleotide sequence of SEQ ID NO: 161, which comprises from 5′ to 3′ end: the 5′ UTR sequence of SEQ ID NO: 50, the ORF sequence of SEQ ID NO: 3, and the 3′ UTR sequence of SEQ ID NO: 110;
[0126] (III) (a) a nucleotide sequence having at least 85%, 90%, 95%, 96%, 97%, 98%, 99% or 100% identity to, or differing by no more than 10, 25, 50, 100, 150, 200, 250, or 300 nucleotides from, the nucleotide sequence of SEQ ID NO: 4 or a functional fragment thereof; (b) the nucleotide sequence of SEQ ID NO: 4 or a functional fragment thereof; or (c) the nucleotide sequence of SEQ ID NO: 162, which comprises from 5′ to 3′ end: the 5′ UTR sequence of SEQ ID NO: 50, ORF sequence of SEQ ID NO: 4, and the 3′ UTR sequence of SEQ ID NO: 143;
[0127] (IV) (a) a nucleotide sequence having at least 85%, 90%, 95%, 96%, 97%, 98%, 99% or 100% identity to, or differing by no more than 10, 25, 50, 100, 150, 200, 250, or 300 nucleotides from, the nucleotide sequence of SEQ ID NO: 5 or a functional fragment thereof; (b) the nucleotide sequence of SEQ ID NO: 5 or a functional fragment thereof; (c) the nucleotide sequence of SEQ ID NO: 163, which comprises from 5′ to 3′ end: the 5′ UTR sequence of SEQ ID NO: 50, the ORF sequence of SEQ ID NO: 5, and the 3′ UTR sequence of SEQ ID NO: 110; (d) the nucleotide sequence of SEQ ID NO: 164, which comprises from 5′ to 3′ end: the 5′ UTR sequence of SEQ ID NO: 50, the ORF sequence of SEQ ID NO: 5, and the 3′ UTR sequence of SEQ ID NO: 144; or (e) the nucleotide sequence of SEQ ID NO: 169, which comprises from 5′ to 3′ end: the 5′ UTR sequence of SEQ ID NO: 50, the ORF sequence of SEQ ID NO: 5, and the 3′ UTR sequence of SEQ ID NO: 145;
[0128] (V) (a) a nucleotide sequence having at least 85%, 90%, 95%, 96%, 97%, 98%, 99% or 100% identity to, or differing by no more than 10, 25, 50, 100, 150, 200, 250, or 300 nucleotides from, the nucleotide sequence of SEQ ID NO: 6 or a functional fragment thereof; (b) the nucleotide sequence of SEQ ID NO: 6 or a functional fragment thereof; (c) the nucleotide sequence of SEQ ID NO: 165, which comprises from 5′ to 3′ end: the 5′ UTR sequence of SEQ ID NO: 50, the ORF sequence of SEQ ID NO: 6, and the 3′ UTR sequence of SEQ ID NO: 110; (d) the nucleotide sequence of SEQ ID NO: 166, which comprises from 5′ to 3′ end: the 5′ UTR sequence of SEQ ID NO: 50, the ORF sequence of SEQ ID NO: 6, and the 3′ UTR sequence of SEQ ID NO: 110; (e) the nucleotide sequence of SEQ ID NO: 167, which comprises from 5′ to 3′ end: the 5′ UTR sequence of SEQ ID NO: 50, the ORF sequence of SEQ ID NO: 6, and the 3′ UTR sequence of SEQ ID NO: 145; or (g) the nucleotide sequence of SEQ ID NO: 168, which comprises from 5′ to 3′ end: the 5′ UTR sequence of SEQ ID NO: 50, the ORF sequence of SEQ ID NO: 6, and the 3′ UTR sequence of SEQ ID NO: 143;
[0129] (VI) (a) a nucleotide sequence having at least 85%, 90%, 95%, 96%, 97%, 98%, 99% or 100% identity to, or differing by no more than 10, 25, 50, 100, 150, 200, 250, or 300 nucleotides from, the nucleotide sequence of SEQ ID NO: 8 or a functional fragment thereof; (b) the nucleotide sequence of SEQ ID NO: 8 or a functional fragment thereof; or (c) the nucleotide sequence of SEQ ID NO: 170, which comprises from 5′ to 3′ end: the 5′ UTR sequence of SEQ ID NO: 50, the ORF sequence of SEQ ID NO: 8, and the 3′ UTR sequence of SEQ ID NO: 110;
[0130] (VII) (a) a nucleotide sequence having at least 85%, 90%, 95%, 96%, 97%, 98%, 99% or 100% identity to, or differing by no more than 10, 25, 50, 100, 150, 200, 250, or 300 nucleotides from, the nucleotide sequence of SEQ ID NO: 10 or a functional fragment thereof; (b) the nucleotide sequence of SEQ ID NO: 10 or a functional fragment thereof; or (c) the nucleotide sequence of SEQ ID NO: 171, which comprises from 5′ to 3′ end: the 5′ UTR sequence of SEQ ID NO: 50, the ORF sequence of SEQ ID NO: 10, and the 3′ UTR sequence of SEQ ID NO: 110;
[0131] (VIII) (a) a nucleotide sequence having at least 85%, 90%, 95%, 96%, 97%, 98%, 99% or 100% identity to, or differing by no more than 10, 25, 50, 100, 150, 200, 250, or 300 nucleotides from, the nucleotide sequence of SEQ ID NO: 12 or a functional fragment thereof; (b) the nucleotide sequence of SEQ ID NO: 12 or a functional fragment thereof; or (c) the nucleotide sequence of SEQ ID NO: 172, which comprises from 5′ to 3′ end: the 5′ UTR sequence of SEQ ID NO: 50, the ORF sequence of SEQ ID NO: 12, and the 3′ UTR sequence of SEQ ID NO: 110;
[0132] (IX) (a) a nucleotide sequence having at least 85%, 90%, 95%, 96%, 97%, 98%, 99% or 100% identity to, or differing by no more than 10, 25, 50, 100, 150, 200, 250, or 300 nucleotides from, the nucleotide sequence of SEQ ID NO: 14 or a functional fragment thereof; (b) the nucleotide sequence of SEQ ID NO: 14 or a functional fragment thereof; or (c) the nucleotide sequence of SEQ ID NO: 173, which comprises from 5′ to 3′ end: the 5′ UTR sequence of SEQ ID NO: 50, the ORF sequence of SEQ ID NO: 14, and the 3′ UTR sequence of SEQ ID NO: 110;
[0133] (X) (a) a nucleotide sequence having at least 85%, 90%, 95%, 96%, 97%, 98%, 99% or 100% identity to, or differing by no more than 10, 25, 50, 100, 150, 200, 250, or 300 nucleotides from, the nucleotide sequence of SEQ ID NO: 16 or a functional fragment thereof; (b) the nucleotide sequence of SEQ ID NO: 16 or a functional fragment thereof; or (c) the nucleotide sequence of SEQ ID NO: 174, which comprises from 5′ to 3′ end: the 5′ UTR sequence of SEQ ID NO: 56, the ORF sequence of SEQ ID NO: 16, and the 3′ UTR sequence of SEQ ID NO: 110; or
[0134] (XI) (a) a nucleotide sequence having at least 85%, 90%, 95%, 96%, 97%, 98%, 99% or 100% identity to, or differing by no more than 10, 25, 50, 100, 150, 200, 250, or 300 nucleotides from, the nucleotide sequence of SEQ ID NO: 18 or a functional fragment thereof; (b) the nucleotide sequence of SEQ ID NO: 18 or a functional fragment thereof; or (c) the nucleotide sequence of SEQ ID NO: 175, which comprises from 5′ to 3′ end: the 5′ UTR sequence of SEQ ID NO: 50, the ORF sequence of SEQ ID NO: 18, and the 3′ UTR sequence of SEQ ID NO: 142.

[0135] E8. The LNP composition of any one of embodiments E1-E7, wherein the polynucleotide encoding the ITB6 molecule comprises: (a) a nucleotide sequence having at least 85%, 90%, 95%, 96%, 97%, 98%, 99% or 100% identity to, or differing by no more than 10, 25, 50, 100, 150, 200, 250, or 300 nucleotides from, the nucleotide sequence of SEQ ID NO: 17 or a functional fragment thereof; (b) the nucleotide sequence of SEQ ID NO: 18 or a functional fragment thereof; or (c) the nucleotide sequence of SEQ ID NO: 175, which comprises from 5′ to 3′ end: the 5′ UTR sequence of SEQ ID NO: 50, the ORF sequence of SEQ ID NO: 17, and the 3′ UTR sequence of SEQ ID NO: 142.

[0136] E9. The LNP composition of any one of embodiments E1-E7, wherein the polynucleotide encoding the ITB6 molecule comprises: (a) a nucleotide sequence having at least 85%, 90%, 95%, 96%, 97%, 98%, 99% or 100% identity to, or differing by no more than 10, 25, 50, 100, 150, 200, 250, or 300 nucleotides from, the nucleotide sequence of SEQ ID NO: 2 or a functional fragment thereof; (b) the nucleotide sequence of SEQ ID NO: 2 or a functional fragment thereof, or (c) the nucleotide sequence of SEQ ID NO: 160, which comprises from 5′ to 3′ end: the 5′ UTR sequence of SEQ ID NO: 56, the ORF sequence of SEQ ID NO: 2, and the 3′ UTR sequence of SEQ ID NO: 110.

[0137] E10. The LNP composition of any one of embodiments E1-E7, wherein the polynucleotide encoding the ITB6 molecule comprises: (a) a nucleotide sequence having at least 85%, 90%, 95%, 96%, 97%, 98%, 99% or 100% identity to, or differing by no more than 10, 25, 50, 100, 150, 200, 250, or 300 nucleotides from, the nucleotide sequence of SEQ ID NO: 3 or a functional fragment thereof; (b) the nucleotide sequence of SEQ ID NO: 3 or a functional fragment thereof, or (c) the nucleotide sequence of SEQ ID NO: 161, which comprises from 5′ to 3′ end: the 5′ UTR sequence of SEQ ID NO: 50, the ORF sequence of SEQ ID NO: 3, and the 3′ UTR sequence of SEQ ID NO: 110.

[0138] E11. The LNP composition of any one of embodiments E1-E7, wherein the polynucleotide encoding the ITB6 molecule comprises: (a) a nucleotide sequence having at least 85%, 90%, 95%, 96%, 97%, 98%, 99% or 100% identity to, or differing by no more than 10, 25, 50, 100, 150, 200, 250, or 300 nucleotides from, the nucleotide sequence of SEQ ID NO: 4 or a functional fragment thereof; (b) the nucleotide sequence of SEQ ID NO: 4 or a functional fragment thereof, or (c) the nucleotide sequence of SEQ ID NO: 162, which comprises from 5′ to 3′ end: the 5′ UTR sequence of SEQ ID NO: 50, ORF sequence of SEQ ID NO: 4, and the 3′ UTR sequence of SEQ ID NO: 143.

[0139] E12. The LNP composition of any one of embodiments E1-E7, wherein the polynucleotide encoding the ITB6 molecule comprises: (a) a nucleotide sequence having at least 85%, 90%, 95%, 96%, 97%, 98%, 99% or 100% identity to, or differing by no more than 10, 25, 50, 100, 150, 200, 250, or 300 nucleotides from, the nucleotide sequence of SEQ ID NO: 5 or a functional fragment thereof; (b) the nucleotide sequence of SEQ ID NO: 5 or a functional fragment thereof, or (c) the nucleotide sequence of SEQ ID NO: 163, which comprises from 5′ to 3′ end: the 5′ UTR sequence of SEQ ID NO: 50, the ORF sequence of SEQ ID NO: 5, and the 3′ UTR sequence of SEQ ID NO: 110.

[0140] E13. The LNP composition of any one of embodiments E1-E7, wherein the polynucleotide encoding the ITB6 molecule comprises: (a) a nucleotide sequence having at least 85%, 90%, 95%, 96%, 97%, 98%, 99% or 100% identity to, or differing by no more than 10, 25, 50, 100, 150, 200, 250, or 300 nucleotides from, the nucleotide sequence of SEQ ID NO: 5 or a functional fragment thereof; (b) the nucleotide sequence of SEQ ID NO: 5 or a functional fragment thereof, or (c) the nucleotide sequence of SEQ ID NO: 164, which comprises from 5′ to 3′ end: the 5′ UTR sequence of SEQ ID NO: 50, the ORF sequence of SEQ ID NO: 5, and the 3′ UTR sequence of SEQ ID NO: 144.

[0141] E14. The LNP composition of any one of embodiments E1-E7, wherein the polynucleotide encoding the ITB6 molecule comprises: (a) a nucleotide sequence having at least 85%, 90%, 95%, 96%, 97%, 98%, 99% or 100% identity to, or differing by no more than 10, 25, 50, 100, 150, 200, 250, or 300 nucleotides from, the nucleotide sequence of SEQ ID NO: 5 or a functional fragment thereof; (b) the nucleotide sequence of SEQ ID NO: 5 or a functional fragment thereof, or (c) the nucleotide sequence of SEQ ID NO: 169, which comprises from 5′ to 3′ end: the 5′ UTR sequence of SEQ ID NO: 50, the ORF sequence of SEQ ID NO: 5, and the 3′ UTR sequence of SEQ ID NO: 145.

[0142] E15. The LNP composition of any one of embodiments E1-E7, wherein the polynucleotide encoding the ITB6 molecule comprises: (a) a nucleotide sequence having at least 85%, 90%, 95%, 96%, 97%, 98%, 99% or 100% identity to, or differing by no more than 10, 25, 50, 100, 150, 200, 250, or 300 nucleotides from, the nucleotide sequence of SEQ ID NO: 6 or a functional fragment thereof; (b) the nucleotide sequence of SEQ ID NO: 6 or a functional fragment thereof, or (c) the nucleotide sequence of SEQ ID NO: 165, which comprises from 5′ to 3′ end: the 5′ UTR sequence of SEQ ID NO: 50, the ORF sequence of SEQ ID NO: 6, and the 3′ UTR sequence of SEQ ID NO: 110.

[0143] E16. The LNP composition of any one of embodiments E1-E7, wherein the polynucleotide encoding the ITB6 molecule comprises: (a) a nucleotide sequence having at least 85%, 90%, 95%, 96%, 97%, 98%, 99% or 100% identity to, or differing by no more than 10, 25, 50, 100, 150, 200, 250, or 300 nucleotides from, the nucleotide sequence of SEQ ID NO: 6 or a functional fragment thereof; (b) the nucleotide sequence of SEQ ID NO: 6 or a functional fragment thereof, or (c) the nucleotide sequence of SEQ ID NO: 166, which comprises from 5′ to 3′ end: the 5′ UTR sequence of SEQ ID NO: 50, the ORF sequence of SEQ ID NO: 6, and the 3′ UTR sequence of SEQ ID NO: 110.

[0144] E17. The LNP composition of any one of embodiments E1-E7, wherein the polynucleotide encoding the ITB6 molecule comprises: (a) a nucleotide sequence having at least 85%, 90%, 95%, 96%, 97%, 98%, 99% or 100% identity to, or differing by no more than 10, 25, 50, 100, 150, 200, 250, or 300 nucleotides from, the nucleotide sequence of SEQ ID NO: 6 or a functional fragment thereof, (b) the nucleotide sequence of SEQ ID NO: 167, which comprises from 5′ to 3′ end: the 5′ UTR sequence of SEQ ID NO: 50, the ORF sequence of SEQ ID NO: 6, and the 3′ UTR sequence of SEQ ID NO: 145.

[0145] E18. The LNP composition of any one of embodiments E1-E7, wherein the polynucleotide encoding the ITB6 molecule comprises: (a) a nucleotide sequence having at least 85%, 90%, 95%, 96%, 97%, 98%, 99% or 100% identity to, or differing by no more than 10, 25, 50, 100, 150, 200, 250, or 300 nucleotides from, the nucleotide sequence of SEQ ID NO: 6 or a functional fragment thereof; (b) the nucleotide sequence of SEQ ID NO: 168, which comprises from 5′ to 3′ end: the 5′ UTR sequence of SEQ ID NO: 50, the ORF sequence of SEQ ID NO: 6, and the 3′ UTR sequence of SEQ ID NO: 143.

[0146] E19. The LNP composition of any one of embodiments E1-E7, wherein the polynucleotide encoding the ITB6 molecule comprises: (a) a nucleotide sequence having at least 85%, 90%, 95%, 96%, 97%, 98%, 99% or 100% identity to, or differing by no more than 10, 25, 50, 100, 150, 200, 250, or 300 nucleotides from, the nucleotide sequence of SEQ ID NO: 8 or a functional fragment thereof; (b) the nucleotide sequence of SEQ ID NO: 8 or a functional fragment thereof, or (c) the nucleotide sequence of SEQ ID NO: 170, which comprises from 5′ to 3′ end: the 5′ UTR sequence of SEQ ID NO: 50, the ORF sequence of SEQ ID NO: 8, and the 3′ UTR sequence of SEQ ID NO: 110.

[0147] E20. The LNP composition of any one of embodiments E1-E7, wherein the polynucleotide encoding the ITB6 molecule comprises: (a) a nucleotide sequence having at least 85%, 90%, 95%, 96%, 97%, 98%, 99% or 100% identity to, or differing by no more than 10, 25, 50, 100, 150, 200, 250, or 300 nucleotides from, the nucleotide sequence of SEQ ID NO: 10 or a functional fragment thereof; (b) the nucleotide sequence of SEQ ID NO: 10 or a functional fragment thereof; or (c) the nucleotide sequence of SEQ ID NO: 171, which comprises from 5′ to 3′ end: the 5′ UTR sequence of SEQ ID NO: 50, the ORF sequence of SEQ ID NO: 10, and the 3′ UTR sequence of SEQ ID NO: 110.

[0148] E21. The LNP composition of any one of embodiments E1-E7, wherein the polynucleotide encoding the ITB6 molecule comprises: (a) a nucleotide sequence having at least 85%, 90%, 95%, 96%, 97%, 98%, 99% or 100% identity to, or differing by no more than 10, 25, 50, 100, 150, 200, 250, or 300 nucleotides from, the nucleotide sequence of SEQ ID NO: 12 or a functional fragment thereof; (b) the nucleotide sequence of SEQ ID NO: 12 or a functional fragment thereof; or (c) the nucleotide sequence of SEQ ID NO: 172, which comprises from 5′ to 3′ end: the 5′ UTR sequence of SEQ ID NO: 50, the ORF sequence of SEQ ID NO: 12, and the 3′ UTR sequence of SEQ ID NO: 110.

[0149] E22. The LNP composition of any one of embodiments E1-E7, wherein the polynucleotide encoding the ITB6 molecule comprises: (a) a nucleotide sequence having at least 85%, 90%, 95%, 96%, 97%, 98%, 99% or 100% identity to, or differing by no more than 10, 25, 50, 100, 150, 200, 250, or 300 nucleotides from, the nucleotide sequence of SEQ ID NO: 14 or a functional fragment thereof; (b) the nucleotide sequence of SEQ ID NO: 14 or a functional fragment thereof; or (c) the nucleotide sequence of SEQ ID NO: 173, which comprises from 5′ to 3′ end: the 5′ UTR sequence of SEQ ID NO: 50, the ORF sequence of SEQ ID NO: 14, and the 3′ UTR sequence of SEQ ID NO: 110.

[0150] E23. The LNP composition of any one of embodiments E1-E7, wherein the polynucleotide encoding the ITB6 molecule comprises: (a) a nucleotide sequence having at least 85%, 90%, 95%, 96%, 97%, 98%, 99% or 100% identity to, or differing by no more than 10, 25, 50, 100, 150, 200, 250, or 300 nucleotides from, the nucleotide sequence of SEQ ID NO: 16 or a functional fragment thereof; (b) the nucleotide sequence of SEQ ID NO: 16 or a functional fragment thereof; or (c) the nucleotide sequence of SEQ ID NO: 174, which comprises from 5′ to 3′ end: the 5′ UTR sequence of SEQ ID NO: 56, the ORF sequence of SEQ ID NO: 16, and the 3′ UTR sequence of SEQ ID NO: 110.

[0151] E24. The LNP composition of any one of embodiments E1-E23, wherein the ITB6 molecule comprises an amino acid sequence that does not comprise a leader sequence and/or an affinity tag.

[0152] E25. The LNP composition of any one of embodiments E1-E24, wherein the ITB6 molecule comprises a half-life extender, e.g., a protein (or fragment thereof) that binds to a serum protein such as albumin; an immunoglobulin domain, e.g., an IgG; FcRn or transferrin.

[0153] E26. The LNP composition of embodiment E25, wherein the half-life extender is an immunoglobulin Fc region or a variant thereof.

[0154] E27. The LNP composition of any one of embodiments E1-E26, which results in a modulation (e.g., suppression) of a T cell activity and/or a T cell function in a population of immune cells, e.g., as compared to a T cell activity and/or a T cell function in an otherwise similar or identical population of immune cells which have not been contacted with the LNP composition comprising a polynucleotide comprising an mRNA which encodes an ITB6 molecule.

[0155] E28. The LNP composition of embodiment E27, wherein the population of immune cells comprise T cells (e.g., CD4+ T cells, CD8+ T cells, or regulatory T cells (Tregs)), B cells, dendritic cells, granulocytes, monocytes and/or macrophages.

[0156] E29. The LNP composition of embodiment E27 or E28, wherein the T cell activity and/or T cell function is an activity and/or a function of a CD8+ T cell (e.g., antigen-specific CD8+ cell) and/or a CD4+ T cell (an antigen-specific CD4+ T cell).

[0157] E30. The LNP composition of any one of embodiments E27-E29, wherein the modulation (e.g., suppression) of a T cell activity and/or a T cell function comprises any one, two, three or all of the following:
[0158] (i) increased level of Treg differentiation;
[0159] (ii) reduced T cell proliferation, survival and/or expansion (e.g., reduced CD4+ T cell proliferation, survival and/or expansion);
[0160] (iii) reduced expression, activity and/or secretion of an effector cytokine (e.g., IFNg);
[0161] and/or
[0162] (iv) reduced expression and/or activity of a T cell transcription factor (e.g., T-bet).

[0163] E31. The LNP composition of any one of embodiments E27-E30, wherein the suppression of a T cell activity and/or a T cell function occurs and/or is determined in vitro, e.g., in a sample.

[0164] E32. The LNP composition of any one of embodiments E27-E31, wherein the suppression of a T cell activity and/or a T cell function occurs and/or is determined in vivo, e.g., in a subject.

[0165] E33. The LNP composition of any one of embodiments E27-E32, wherein the suppression of a T cell activity and/or a T cell function comprises (i) increased level of Treg differentiation.

[0166] E34. The LNP composition of embodiment E33, wherein the level of Treg differentiation (e.g., from antigen-specific CD4+ T cells) is increased by about 1-10-fold (e.g., about 2-8-fold, 3-7-fold, 4-6-fold, 1-8-fold, 1-6-fold, 1-4-fold, 1-2-fold, 8-10-fold, 6-10-fold, 4-10-fold, 2-10-fold, 1-3-fold, 2-4-fold, 3-5-fold, 5-7-fold, 6-8-fold, or 7-9-fold), compared to a reference level of Treg differentiation, e.g., as determined by a method described in Examples 2 and 4.

[0167] E35. The LNP composition of embodiment E33 or E34, wherein the reference level of Treg differentiation (e.g., from antigen specific CD4+ T cells) is the level of Treg differentiation in an otherwise similar sample or subject which has not been contacted with the LNP composition comprising a polynucleotide comprising an mRNA which encodes an ITB6 molecule.

[0168] E36. The LNP composition of any one of embodiments E27-E35, wherein the suppression of a T cell activity and/or a T cell function comprises (ii) reduced T cell proliferation, survival and/or expansion, e.g., reduced CD4+ T cell proliferation, survival and/or expansion.

[0169] E37. The LNP composition of embodiment E36, wherein the T cell proliferation, survival and/or expansion is reduced by about 1-10-fold (e.g., about 2-8-fold, 3-7-fold, 4-6-fold, 1-8-fold, 1-6-fold, 1-4-fold, 1-2-fold, 8-10-fold, 6-10-fold, 4-10-fold, 2-10-fold, 1-3-fold, 2-4-fold, 3-5-fold, 5-7-fold, 6-8-fold, or 7-9-fold), compared to a reference level of T cell proliferation, survival and/or expansion, e.g., as determined by a method described in Examples 3 and 7.

[0170] E38. The LNP composition of embodiment E36 or E37, wherein the reference level of T cell proliferation, survival and/or expansion is the level of T cell proliferation, survival and/or expansion in an otherwise similar sample or subject which has not been contacted with the LNP composition comprising a polynucleotide comprising an mRNA which encodes an ITB6 molecule.

[0171] E39. The LNP composition of any one of embodiments E36-E38, wherein the reduction in T cell proliferation, survival and/or expansion occurs upon, or is determined after: (a) co-culture of T cells (e.g., CD4+ T cells) with dendritic cells that have been contacted with an LNP composition comprising a polynucleotide comprising an mRNA which encodes an ITB6 molecule; and/or (b) contact with a cytokine (e.g., TGFbeta).

[0172] E40. The LNP composition of any one of embodiments E27-E39, wherein the suppression of a T cell activity and/or a T cell function comprises (iii) reduced expression, activity and/or secretion of an effector cytokine (e.g., IFNg).

[0173] E41. The LNP composition of embodiment E40, wherein the expression, activity and/or secretion of an effector cytokine is reduced by about 1-10-fold (e.g., about 2-8-fold, 3-7-fold, 4-6-fold, 1-8-fold, 1-6-fold, 1-4-fold, 1-2-fold, 8-10-fold, 6-10-fold, 4-10-fold, 2-10-fold, 1-3-fold, 2-4-fold, 3-5-fold, 5-7-fold, 6-8-fold, or 7-9-fold), compared to a reference level of expression, activity and/or secretion of the effector cytokine.

[0174] E42. The LNP composition of embodiment E40 or E41, wherein the reference level of expression, activity and/or secretion of the effector cytokine is the level of expression, activity and/or secretion of the effector cytokine in an otherwise similar or identical sample which has not been contacted with the LNP composition comprising a polynucleotide comprising an mRNA which encodes an ITB6 molecule, or which has not been contacted with an immune cell (e.g., T cell) activating or stimulating agent.

[0175] E43. The LNP composition of any one of embodiments E40-E42, wherein the effector cytokine is IFNg, and wherein the expression of IFNg (e.g., produced by antigen-specific CD8+ T cells) is reduced by about 1-10-fold (e.g., about 2-8-fold, 3-7-fold, 4-6-fold, 1-8-fold, 1-6-fold, 1-4-fold, 1-2-fold, 8-10-fold, 6-10-fold, 4-10-fold, 2-10-fold, 1-3-fold, 2-4-fold, 3-5-fold, 5-7-fold, 6-8-fold, or 7-9-fold) in a sample, e.g., as determined by a method described in Examples 5 and 9.

[0176] E44. The LNP composition of embodiment E43, wherein the sample has been contacted with an immune cell (e.g., T cell) activating or stimulating agent.

[0177] E45. The LNP composition of any one of embodiments E43 or E44, wherein the T cells (e.g., CD8+ T cells) in the sample have been stimulated and/or activated, e.g., with a peptide or costimulatory molecule.

[0178] E46. The LNP composition of any one of embodiments E27-E45, wherein the suppression of a T cell activity and/or a T cell function comprises (iv) reduced expression and/or activity of a T cell transcription factor (e.g., T-bet).

[0179] E47. The LNP composition of embodiment E46, wherein the expression and/or activity of the T cell transcription factor is reduced by about 1-10-fold (e.g., about 2-8-fold, 3-7-fold, 4-6-fold, 1-8-fold, 1-6-fold, 1-4-fold, 1-2-fold, 8-10-fold, 6-10-fold, 4-10-fold, 2-10-fold, 1-3-fold, 2-4-fold, 3-5-fold, 5-7-fold, 6-8-fold, or 7-9-fold), compared to a reference level of expression and/or activity of the T cell transcription factor.

[0180] E48. The LNP composition of embodiment E46 or E47, wherein the reference level of expression and/or activity of the T cell transcription factor is the level of expression and/or activity of the T cell transcription factor in an otherwise similar sample or subject which has not been contacted with the LNP composition comprising a polynucleotide comprising an mRNA which encodes an ITB6 molecule.

[0181] E49. The LNP composition of any one of embodiments E46-E48, wherein the T cell transcription factor is T-bet, and wherein the expression of T-bet is reduced by about 1-10-fold (e.g., about 2-8-fold, 3-7-fold, 4-6-fold, 1-8-fold, 1-6-fold, 1-4-fold, 1-2-fold, 8-10-fold, 6-10-fold, 4-10-fold, 2-10-fold, 1-3-fold, 2-4-fold, 3-5-fold, 5-7-fold, 6-8-fold, or 7-9-fold) in a sample or subject, e.g., as determined by a method described in Example 8.

[0182] E50. The LNP composition of embodiment E49, wherein the reduction in the expression and/or an activity of T-bet occurs upon, or is determined after, co-culture of T cells with dendritic cells that have been contacted with an LNP composition comprising a polynucleotide comprising an mRNA which encodes an ITB6 molecule.

[0183] E51. The LNP composition of any one of embodiments E1-E50, which results in any one, two, three, four or all of the following, in a subject having, or at risk of having, graft vs host disease (GvHD):
[0184] (i) reduced donor immune cell (e.g., T cell) proliferation;
[0185] (ii) reduced weight loss, host B cell depletion, and/or donor immune cell (e.g., T cell) engraftment, optionally with concurrent Treg expansion;
[0186] (iii) reduced Tbet+ cells in T cell population (e.g., CD8+ T cell population);
[0187] (iv) reduced expression, activity and/or secretion of a proinflammatory cytokine (e.g., IFNg); and/or
[0188] (v) maintained or increased Treg and/or host lymphocyte population.

[0189] E52. The LNP composition of embodiment E51, which results in (i) reduced donor immune cell (e.g., T cell) proliferation.

[0190] E53. The LNP composition of embodiment E52, wherein the donor immune cell (e.g., T cell) proliferation is reduced by about 1-10-fold (e.g., about 2-8-fold, 3-7-fold, 4-6-fold, 1-8-fold, 1-6-fold, 1-4-fold, 1-2-fold, 8-10-fold, 6-10-fold, 4-10-fold, 2-10-fold, 1-3-fold, 2-4-fold, 3-5-fold, 5-7-fold, 6-8-fold, or 7-9-fold), compared to a reference level of donor immune cell (e.g., T cell) proliferation, e.g., as determined by a method described in Example 7.

[0191] E54. The LNP composition of embodiment E51 or E52, wherein the reference level of donor cell (e.g., T cell) proliferation is the level of donor immune cell (e.g., T cell) proliferation in the subject before being contacted with the LNP composition comprising a polynucleotide comprising an mRNA which encodes an ITB6 molecule, or in an otherwise similar subject who has not been contacted with the LNP composition comprising a polynucleotide comprising an mRNA which encodes an ITB6 molecule.

[0192] E55. The LNP composition of any of embodiments E51-E54, which results in (ii) reduced weight loss, host B cell depletion, and/or donor immune cell (e.g., T cell) engraftment, optionally with concurrent Treg expansion.

[0193] E56. The LNP composition of embodiment E55, wherein the weight loss, host B cell depletion, and/or donor immune cell (e.g., T cell) engraftment is reduced by about 1-10-fold (e.g., about 2-8-fold, 3-7-fold, 4-6-fold, 1-8-fold, 1-6-fold, 1-4-fold, 1-2-fold, 8-10-fold, 6-10-fold, 4-10-fold, 2-10-fold, 1-3-fold, 2-4-fold, 3-5-fold, 5-7-fold, 6-8-fold, or 7-9-fold), compared to a reference level of weight loss, host B cell depletion, and/or donor immune cell (e.g., T cell) engraftment, e.g., as determined by a method described in Example 6.

[0194] E57. The LNP composition of embodiment E56, wherein the reference level of weight loss, host B cell depletion, and/or donor immune cell (e.g., T cell) engraftment is the level of weight loss, host B cell depletion, and/or donor immune cell (e.g., T cell) engraftment in the subject before being contacted with the LNP composition comprising a polynucleotide comprising an mRNA which encodes an ITB6 molecule, or in an otherwise similar subject who has not been contacted with the LNP composition comprising a polynucleotide comprising an mRNA which encodes an ITB6 molecule.

[0195] E58. The LNP composition of any of embodiments E51-E57, wherein the donor immune cell specified in (i) or (ii) comprise T cell, e.g., CD8+ T cell, CD4+ T cell, or T regulatory cell (e.g., CD25+ and/or FoxP3+ T cell).

[0196] E59. The LNP composition of any of embodiments E51-E58, which results in (iii) reduced Tbet+ cells in T cell population (e.g., CD8+ T cell population).

[0197] E60. The LNP composition of any of embodiments E51-E59, wherein the Tbet+ cells in T cell population (e.g., CD8+ T cell population) is reduced by about 1-10-fold (e.g., about 2-8-fold, 3-7-fold, 4-6-fold, 1-8-fold, 1-6-fold, 1-4-fold, 1-2-fold, 8-10-fold, 6-10-fold, 4-10-fold, 2-10-fold, 1-3-fold, 2-4-fold, 3-5-fold, 5-7-fold, 6-8-fold, or 7-9-fold), compared to a reference level of Tbet+ cells in T cell population (e.g., CD8+ T cell population), e.g., as determined by a method described in Example 8.

[0198] E61. The LNP composition of embodiment E60, wherein the reference level of Tbet+ cells in T cell population (e.g., CD8+ T cell population) is the level of Tbet+ cells in T cell population (e.g., CD8+ T cell population) in the subject before being contacted with the LNP composition comprising a polynucleotide comprising an mRNA which encodes an ITB6 molecule, or in an otherwise similar subject who has not been contacted with the LNP composition comprising a polynucleotide comprising an mRNA which encodes an ITB6 molecule.

[0199] E62. The LNP composition of any of embodiments E51-E61, which results in (iv) reduced expression, activity and/or secretion of a proinflammatory cytokine (e.g., IFNg).

[0200] E63. The LNP composition of any of embodiments E51-E62, wherein the expression, activity and/or secretion of a proinflammatory cytokine (e.g., IFNg) is reduced by about 1-10-fold (e.g., about 2-8-fold, 3-7-fold, 4-6-fold, 1-8-fold, 1-6-fold, 1-4-fold, 1-2-fold, 8-10-fold, 6-10-fold, 4-10-fold, 2-10-fold, 1-3-fold, 2-4-fold, 3-5-fold, 5-7-fold, 6-8-fold, or 7-9-fold), compared to a reference level of expression, activity and/or secretion of a proinflammatory cytokine (e.g., IFNg), e.g., as measured by an assay described in Example 9.

[0201] E64. The LNP composition of embodiment E63, the reference level of expression, activity and/or secretion of a proinflammatory cytokine (e.g., IFNg) is the level of expression, activity and/or secretion of a proinflammatory cytokine (e.g., IFNg) in the subject before being contacted with the LNP composition comprising a polynucleotide comprising an mRNA which encodes an ITB6 molecule, or in an otherwise similar subject who has not been contacted with the LNP composition comprising a polynucleotide comprising an mRNA which encodes an ITB6 molecule.

[0202] E65. The LNP composition of any of embodiments E51-E64, which results in (v) maintained or increased Treg and/or host lymphocyte population.

[0203] E66. The LNP composition of any of embodiments E51-E65, wherein the Treg and/or host lymphocyte population is substantially unchanged or increased by about 1-10-fold (e.g., about 2-8-fold, 3-7-fold, 4-6-fold, 1-8-fold, 1-6-fold, 1-4-fold, 1-2-fold, 8-10-fold, 6-10-fold, 4-10-fold, 2-10-fold, 1-3-fold, 2-4-fold, 3-5-fold, 5-7-fold, 6-8-fold, or 7-9-fold), compared to a reference level of Treg and/or host lymphocyte population, e.g., as measured by an assay described in Example 10.

[0204] E67. The LNP composition of embodiment E66, the reference level of Treg and/or host lymphocyte population is the level of Treg and/or host lymphocyte population in the subject before being contacted with the LNP composition comprising a polynucleotide comprising an mRNA which encodes an ITB6 molecule, or in an otherwise similar subject who has not been contacted with the LNP composition comprising a polynucleotide comprising an mRNA which encodes an ITB6 molecule.

[0205] E68. The LNP composition of any of embodiments E1-E67, which results in delayed onset of GvHD in a subject.

[0206] E69. The LNP composition of E68, wherein the onset of GvHD is delayed by at least 1 week, 2 weeks, 3 weeks, 1 month, 2 months, 3 months, 4 months, 5 months, 6 months, 7 months, 8 months, 9 months, 10 months, 11 months, 12 months, 1.5 years or 2 years, compared to a reference onset of GvHD, e.g., the onset of GvHD in an otherwise similar subject who has not been contacted with the LNP composition comprising a polynucleotide comprising an mRNA which encodes an ITB6 molecule.

[0207] E70. The LNP composition of any of embodiments E1-E68, which results in delayed onset of GvHD in a subject.

[0208] E71. The LNP composition of E70, wherein the onset of GvHD is delayed by at least 1 week, 2 weeks, 3 weeks, 1 month, 2 months, 3 months, 4 months, 5 months, 6 months, 7 months, 8 months, 9 months, 10 months, 11 months, 12 months, 1.5 years or 2 years, compared to a reference onset of GvHD, e.g., the onset of GvHD in an otherwise similar subject who has not been contacted with the LNP composition comprising a polynucleotide comprising an mRNA which encodes an ITB6 molecule.

[0209] E72. The LNP composition of any one of embodiments E1-E71, which results in amelioration of GvHD or a symptom thereof in a subject, e.g., compared to the subject before being contacted with the LNP composition comprising a polynucleotide comprising an mRNA which encodes an ITB6 molecule, or a subject who has not been contacted with the LNP composition comprising a polynucleotide comprising an mRNA which encodes an ITB6 molecule.

[0210] E73. A method of assessing the responsiveness of a subject to a therapy comprising an LNP composition comprising an mRNA which encodes an ITB6 molecule, the method comprising:
[0211] (a) measuring the expression level of one or more biomarkers (e.g., selected from the group consisting of: PMEPA1, ITGAE/CD103, SMAD7, SKIL, and SKI) in a sample from the subject collected following administration of the therapy; and
[0212] (b) comparing the expression level in the sample with a reference expression level, wherein an increase in the expression level of the one or more biomarkers is indicative of a response to the therapy.

[0213] E74. The method of embodiment E73, wherein the one or more biomarkers are one or more of PMEPA1, ITGAE/CD103, SMAD7, SKIL, and SKI.

[0214] E75. The method of embodiment E73 or E74, wherein the level of one or more of the one or more biomarkers in the sample from the subject following treatment is at least 2-fold (e.g., at least 3-fold, 4-fold, 5-fold, 6-fold, 7-fold, 8-fold, 9-fold, or 10-fold) greater than a reference expression level of the one or more biomarkers, wherein the reference expression level comprises:
[0215] (a) the expression level of the one or more biomarkers in a sample from the subject prior to treatment with an ITB6 mRNA; or
[0216] (b) the expression level of o the one or more biomarkers in a sample from a subject who has not received the treatment with an ITB6 mRNA.

[0217] E76. The LNP composition of any one of the preceding embodiments, wherein the polynucleotide comprising an mRNA encoding the ITB6 molecule, comprises at least one chemical modification.

[0218] E77. The LNP composition of embodiment E76, wherein the chemical modification is selected from the group consisting of pseudouridine, N1-methylpseudouridine, 2-thiouridine, 4′-thiouridine, 5-methylcytosine, 2-thio-1-methyl-1-deaza-pseudouridine, 2-thio-1-methyl-pseudouridine, 2-thio-5-aza-uridine, 2-thio-dihydropseudouridine, 2-thio-dihydrouridine, 2-thio-pseudouridine, 4-methoxy-2-thio-pseudouridine, 4-methoxy-pseudouridine, 4-thio-1-methyl-pseudouridine, 4-thio-pseudouridine, 5-aza-uridine, dihydropseudouridine, 5-methyluridine, 5-methyluridine, 5-methoxyuridine, and 2′-O-methyl uridine.

[0219] E78. The LNP composition of embodiment E76 or E77, wherein the chemical modification is selected from the group consisting of pseudouridine, N1-methylpseudouridine, 5-methylcytosine, 5-methoxyuridine, and a combination thereof.

[0220] E79. The LNP composition of any one of embodiments E76-E78, wherein the chemical modification is N1-methylpseudouridine.

[0221] E80. The LNP composition of any one of the preceding embodiments, wherein the mRNA in the lipid nanoparticle comprises fully modified N1-methylpseudouridine.

[0222] E81. The LNP composition of any one of the preceding embodiments, wherein the LNP composition comprises: (i) an ionizable lipid, e.g., an amino lipid; (ii) a sterol or other structural lipid; (iii) a non-cationic helper lipid or phospholipid; and (iv) a PEG-lipid.

[0223] E82. The LNP composition of embodiment E81, wherein the ionizable lipid comprises an amino lipid.

[0224] E83. The LNP composition of embodiment E81 or E82, wherein the ionizable lipid comprises a compound of any of Formulae (I), (I-a), (I-b), (I-c), (II), (II-a), (II-b), (II-c), (II-d), (II-e), (II-f), (II-g), (II-h), or (III).

[0225] E84. The LNP composition of any one of embodiments E81-E83, wherein the ionizable lipid comprises a compound of Formula (I).

[0226] E85. The LNP composition of any one of embodiments E81-E84, wherein the ionizable lipid comprises Compound 18, Compound 25, Compound 301, or Compound 357.

[0227] E86. The LNP composition of any one of embodiments E81-E85, wherein the LNP comprises a molar ratio of about 20-60% ionizable lipid:5-25% phospholipid:25-55% cholesterol; and 0.5-15% PEG lipid.

[0228] E87. The LNP composition of embodiment E86, wherein the LNP comprises a molar ratio of about 50% ionizable lipid:about 10% phospholipid:about 38.5% cholesterol; and about 1.5% PEG lipid.

[0229] E88. The LNP composition of embodiment E86 or E87, wherein the LNP comprises a molar ratio of about 49.83% ionizable lipid:about 9.83% phospholipid:about 30.33% cholesterol; and
[0230] about 2.0% PEG lipid.

[0231] E89. The LNP composition of any one of embodiments E86-E88, wherein the ionizable lipid comprises a compound of any of Formulae (I), (I-a), (I-b), (I-c), (II), (II-a), (II-b), (II-c), (II-d), (II-e), (II-f), (II-g), (II-h), or (III).

[0232] E90. The LNP composition of embodiment E89, wherein the ionizable lipid comprises a compound of Formula (I).

[0233] E91. The LNP composition of embodiment E89 or E90, wherein the ionizable lipid comprises Compound 18, Compound 25, Compound 301, or Compound 357.

[0234] E92. The LNP composition of any one of the preceding embodiments, which is formulated for intravenous, subcutaneous, intramuscular, intranasal, intraocular, rectal, or oral delivery.

[0235] E93. The LNP composition of any one of the preceding embodiments, further comprising a pharmaceutically acceptable carrier or excipient.

[0236] E94. A pharmaceutical composition comprising the LNP composition of any one of embodiments E1-E93.

[0237] E95. A method of modulating, e.g., suppressing, an immune response in a subject, comprising administering to the subject in need thereof an effective amount of an LNP composition comprising a polynucleotide comprising an mRNA which encodes an ITB6 molecule.

[0238] E96. A method of treating, preventing or preventing a symptom of, a disease with aberrant T cell function, e.g., an autoimmune disease or an inflammatory disease, comprising administering to the subject in need thereof an effective amount of an LNP composition comprising a polynucleotide comprising an mRNA which encodes an ITB6 molecule.

[0239] E97. A composition comprising an LNP composition which comprises a polynucleotide comprising an mRNA encoding an ITB6 molecule, for use in a method of treating, preventing or preventing a symptom of, a disease with aberrant T cell function, e.g., an autoimmune disease or an inflammatory disease.

[0240] E98. The method of E96 or the LNP composition for use of embodiment E97, wherein the disease is chosen from rheumatoid arthritis (RA); graft versus host disease (GVHD) (e.g., acute GVHD or chronic GVHD); diabetes, e.g., Type 1 diabetes; inflammatory bowel disease (IBD); lupus (e.g., systemic lupus erythematosus (SLE)), multiple sclerosis; autoimmune hepatitis (e.g., Type 1 or Type 2); primary biliary cholangitis; organ transplant associated rejection; or myasthenia gravis.

[0241] E99. The method, or the LNP composition for use of any one of E95-E98, wherein the ITB6 molecule comprises a naturally occurring ITB6 molecule, a fragment of a naturally occurring ITB6 molecule, or a variant thereof.

[0242] E100. The method, or the LNP composition for use of E99, wherein the ITB6 molecule comprises an amino acid sequence having at least 85%, 90%, 95%, 96%, 97%, 98%, 99% or 100% identity to an amino acid sequence of ITB6 provided in Table 1A or Table 2A, e.g., any one of SEQ ID NOs: 17, 1, 7, 9, 11, 13, or 15.

[0243] E101. The method, or the LNP composition for use of E99, wherein the ITB6 molecule comprises the amino acid sequence of any one of SEQ ID NOs: 17, 1, 7, 9, 11, 13, or 15.

[0244] E102. The method, or the LNP composition for use of E99, wherein the polynucleotide encoding the ITB6 molecule comprises a nucleotide sequence having at least 85%, 90%, 95%, 96%, 97%, 98%, 99% or 100% identity to an ITB6 nucleotide sequence provided in Table 1A or Table 2A, e.g., any one of SEQ ID NOs: 18, 2-6, 8, 10, 12, 14, 16, or 160-175.

[0245] E103. The method, or the LNP composition for use of E99, wherein the polynucleotide encoding the ITB6 molecule comprises:
[0246] (a) a nucleotide sequence having at least 85%, 90%, 95%, 96%, 97%, 98%, 99% or 100% identity to the sequence of SEQ ID NO: 18;
[0247] (b) the nucleotide sequence of SEQ ID NO: 18; or
[0248] (c) the nucleotide sequence of SEQ ID NO: 175, which comprises from 5′ to 3′ end: the 5′ UTR sequence of SEQ ID NO: 50, the ORF sequence of SEQ ID NO:18, and the 3′ UTR sequence of SEQ ID NO: 142.

[0249] E104. The method, or the LNP composition for use of E99, wherein the polynucleotide encoding the ITB6 molecule comprises:
[0250] (a) a nucleotide sequence having at least 85%, 90%, 95%, 96%, 97%, 98%, 99% or 100% identity to the sequence of SEQ ID NO: 2;
[0251] (b) the nucleotide sequence of SEQ ID NO: 2; or
[0252] (c) the nucleotide sequence of SEQ ID NO: 160, which comprises from 5′ to 3′ end: the 5′ UTR sequence of SEQ ID NO: 56, the ORF sequence of SEQ ID NO: 2, and the 3′ UTR sequence of SEQ ID NO: 110.

[0253] E105. The method, or the LNP composition for use of E99, wherein the polynucleotide encoding the ITB6 molecule comprises:
[0254] (a) a nucleotide sequence having at least 85%, 90%, 95%, 96%, 97%, 98%, 99% or 100% identity to the sequence of SEQ ID NO: 3;
[0255] (b) the nucleotide sequence of SEQ ID NO: 3; or
[0256] (c) the nucleotide sequence of SEQ ID NO: 161, which comprises from 5′ to 3′ end: the 5′ UTR sequence of SEQ ID NO: 50, the ORF sequence of SEQ ID NO: 3, and the 3′ UTR sequence of SEQ ID NO: 110.

[0257] E106. The method, or the LNP composition for use of E99, wherein the polynucleotide encoding the ITB6 molecule comprises:
[0258] (a) a nucleotide sequence having at least 85%, 90%, 95%, 96%, 97%, 98%, 99% or 100% identity to the sequence of SEQ ID NO: 4;
[0259] (b) the nucleotide sequence of SEQ ID NO: 4; or
[0260] (c) the nucleotide sequence of SEQ ID NO: 162, which comprises from 5′ to 3′ end: the 5′ UTR sequence of SEQ ID NO: 50, ORF sequence of SEQ ID NO: 4, and the 3′ UTR sequence of SEQ ID NO: 143.

[0261] E107. The method, or the LNP composition for use of E99, wherein the polynucleotide encoding the ITB6 molecule comprises:
[0262] (a) a nucleotide sequence having at least 85%, 90%, 95%, 96%, 97%, 98%, 99% or 100% identity to the sequence of SEQ ID NO: 5;
[0263] (b) the nucleotide sequence of SEQ ID NO: 5; or
[0264] (c) the nucleotide sequence of SEQ ID NO: 163, which comprises from 5′ to 3′ end: the 5′ UTR sequence of SEQ ID NO: 50, the ORF sequence of SEQ ID NO: 5, and the 3′ UTR sequence of SEQ ID NO: 110.

[0265] E108. The method, or the LNP composition for use of E99, wherein the polynucleotide encoding the ITB6 molecule comprises:
[0266] (a) a nucleotide sequence having at least 85%, 90%, 95%, 96%, 97%, 98%, 99% or 100% identity to the sequence of SEQ ID NO: 5;
[0267] (b) the nucleotide sequence of SEQ ID NO: 5; or
[0268] (c) the nucleotide sequence of SEQ ID NO: 164, which comprises from 5′ to 3′ end: the 5′ UTR sequence of SEQ ID NO: 50, the ORF sequence of SEQ ID NO: 5, and the 3′ UTR sequence of SEQ ID NO: 144.

[0269] E109. The method, or the LNP composition for use of E99, wherein the polynucleotide encoding the ITB6 molecule comprises:
[0270] (a) a nucleotide sequence having at least 85%, 90%, 95%, 96%, 97%, 98%, 99% or 100% identity to the sequence of SEQ ID NO: 5;
[0271] (b) the nucleotide sequence of SEQ ID NO: 5; or
[0272] (c) the nucleotide sequence of SEQ ID NO: 169, which comprises from 5′ to 3′ end: the 5′ UTR sequence of SEQ ID NO: 50, the ORF sequence of SEQ ID NO: 5, and the 3′ UTR sequence of SEQ ID NO: 145.

[0273] E110. The method, or the LNP composition for use of E99, wherein the polynucleotide encoding the ITB6 molecule comprises:
[0274] (a) a nucleotide sequence having at least 85%, 90%, 95%, 96%, 97%, 98%, 99% or 100% identity to the sequence of SEQ ID NO: 6;
[0275] (b) the nucleotide sequence of SEQ ID NO: 6; or
[0276] (c) the nucleotide sequence of SEQ ID NO: 165, which comprises from 5′ to 3′ end: the 5′ UTR sequence of SEQ ID NO: 50, the ORF sequence of SEQ ID NO: 6, and the 3′ UTR sequence of SEQ ID NO: 110.

[0277] E111. The method, or the LNP composition for use of E99, wherein the polynucleotide encoding the ITB6 molecule comprises:
[0278] (a) a nucleotide sequence having at least 85%, 90%, 95%, 96%, 97%, 98%, 99% or 100% identity to the sequence of SEQ ID NO: 6;
[0279] (b) the nucleotide sequence of SEQ ID NO: 6; or
[0280] (c) the nucleotide sequence of SEQ ID NO: 166, which comprises from 5′ to 3′ end: the 5′ UTR sequence of SEQ ID NO: 50, the ORF sequence of SEQ ID NO: 6, and the 3′ UTR sequence of SEQ ID NO: 110.

[0281] E112. The method, or the LNP composition for use of E99, wherein the polynucleotide encoding the ITB6 molecule comprises:
[0282] (a) a nucleotide sequence having at least 85%, 90%, 95%, 96%, 97%, 98%, 99% or 100% identity to the sequence of SEQ ID NO: 6;
[0283] (b) the nucleotide sequence of SEQ ID NO: 6; or
[0284] (c) the nucleotide sequence of SEQ ID NO: 167, which comprises from 5′ to 3′ end: the 5′ UTR sequence of SEQ ID NO: 50, the ORF sequence of SEQ ID NO: 6, and the 3′ UTR sequence of SEQ ID NO: 145.

[0285] E113. The method, or the LNP composition for use of E99, wherein the polynucleotide encoding the ITB6 molecule comprises:
[0286] (a) a nucleotide sequence having at least 85%, 90%, 95%, 96%, 97%, 98%, 99% or 100% identity to the sequence of SEQ ID NO: 6;
[0287] (b) the nucleotide sequence of SEQ ID NO: 6; or
[0288] (c) the nucleotide sequence of SEQ ID NO: 168, which comprises from 5′ to 3′ end: the 5′ UTR sequence of SEQ ID NO: 50, the ORF sequence of SEQ ID NO: 6, and the 3′ UTR sequence of SEQ ID NO: 143.

[0289] E114. The method, or the LNP composition for use of E99, wherein the polynucleotide encoding the ITB6 molecule comprises:
[0290] (a) a nucleotide sequence having at least 85%, 90%, 95%, 96%, 97%, 98%, 99% or 100% identity to the sequence of SEQ ID NO: 8;
[0291] (b) the nucleotide sequence of SEQ ID NO: 8; or
[0292] (c) the nucleotide sequence of SEQ ID NO: 170, which comprises from 5′ to 3′ end: the 5′ UTR sequence of SEQ ID NO: 50, the ORF sequence of SEQ ID NO: 8, and the 3′ UTR sequence of SEQ ID NO: 110.

[0293] E115. The method, or the LNP composition for use of E99, wherein the polynucleotide encoding the ITB6 molecule comprises:
[0294] (a) a nucleotide sequence having at least 85%, 90%, 95%, 96%, 97%, 98%, 99% or 100% identity to the sequence of SEQ ID NO: 10;
[0295] (b) the nucleotide sequence of SEQ ID NO: 10; or
[0296] (c) the nucleotide sequence of SEQ ID NO: 171, which comprises from 5′ to 3′ end: the 5′ UTR sequence of SEQ ID NO: 50, the ORF sequence of SEQ ID NO: 10, and the 3′ UTR sequence of SEQ ID NO: 110.

[0297] E116. The method, or the LNP composition for use of E99, wherein the polynucleotide encoding the ITB6 molecule comprises:
[0298] (a) a nucleotide sequence having at least 85%, 90%, 95%, 96%, 97%, 98%, 99% or 100% identity to the sequence of SEQ ID NO: 12;
[0299] (b) the nucleotide sequence of SEQ ID NO: 12; or
[0300] (c) the nucleotide sequence of SEQ ID NO: 172, which comprises from 5′ to 3′ end: the 5′ UTR sequence of SEQ ID NO: 50, the ORF sequence of SEQ ID NO: 12, and the 3′ UTR sequence of SEQ ID NO: 110.

[0301] E117. The method, or the LNP composition for use of E99, wherein the polynucleotide encoding the ITB6 molecule comprises:
[0302] (a) a nucleotide sequence having at least 85%, 90%, 95%, 96%, 97%, 98%, 99% or 100% identity to the sequence of SEQ ID NO: 14;
[0303] (b) the nucleotide sequence of SEQ ID NO: 14; or
[0304] (c) the nucleotide sequence of SEQ ID NO: 173, which comprises from 5′ to 3′ end: the 5′ UTR sequence of SEQ ID NO: 50, the ORF sequence of SEQ ID NO: 14, and the 3′ UTR sequence of SEQ ID NO: 110.

[0305] E118. The method, or the LNP composition for use of E99, wherein the polynucleotide encoding the ITB6 molecule comprises:
[0306] (a) a nucleotide sequence having at least 85%, 90%, 95%, 96%, 97%, 98%, 99% or 100% identity to the sequence of SEQ ID NO: 16;
[0307] (b) the nucleotide sequence of SEQ ID NO: 16; or
[0308] (c) the nucleotide sequence of SEQ ID NO: 174, which comprises from 5′ to 3′ end: the 5′ UTR sequence of SEQ ID NO: 56, the ORF sequence of SEQ ID NO: 16, and the 3′ UTR sequence of SEQ ID NO: 110.

[0309] E119. The method, or the LNP composition for use of E99, wherein the ITB6 molecule comprises an amino acid sequence that does not comprise a leader sequence and/or an affinity tag.

[0310] E120. The method, or the LNP composition for use of any one of embodiments E95-E119, wherein the subject is a mammal, e.g., a human.

[0311] E121. The LNP composition for use, or the method of any one of embodiments E95-E120, wherein the LNP composition is administered to a subject according to a dosing interval, e.g., as described herein.

[0312] E122. The LNP composition for use, or the method of embodiment E121, wherein the dosing interval comprises an initial dose of the LNP composition and one or more subsequent doses (e.g., 1-50 doses, 5-50 doses, 10-50 doses, 15-50 doses, 20-50 doses, 25-50 doses, 30-50 doses, 35-50 doses, 40-50 doses, 45-50 doses, 1-45 doses, 1-40 doses, 1-35 doses, 1-30 doses, 1-25 doses, 1-20 doses, 1-15 doses, 1-10 doses, or 1-5 doses) of the same LNP composition.

[0313] E123. The LNP composition for use, or the method of embodiment E121 or E122, wherein the dosing interval comprises one or more doses of the LNP composition and one or more doses of an additional agent.

[0314] E124. The LNP composition for use, or the method of any one of embodiments E121-E123, wherein the dosing interval is performed over at least 1 week, 2 weeks, 3 weeks, or 4 weeks.

[0315] E125. The LNP composition for use, or the method of any one of embodiments E120-E124, wherein the dosing interval comprises a cycle, e.g., a seven-day cycle.

[0316] E126. The LNP composition for use, or the method of any one of embodiments E120-E125, wherein the dosing interval is repeated at least 1 time, at least 2 times, at least 3 times, at least 4 times, at least 5 times, at least 6 times, at least 7 times, at least 8 times, at least 9 times, or at least 10 times.

[0317] E127. The LNP composition for use, or the method of any one of embodiments E120-E126, wherein the repeated dosing interval is performed over at least 2 weeks, 3 weeks, 4 weeks, 2 months, 3 months, 4 months, 5 months, 6 months, 7 months, 8 months, 9 months, 10 months, 11 months, 12 months, 13 months, 14 months, 15 months, 16 months, 17 months, 18 months, 19 months, 20 months, 21 months, 22 months, 23 months, 24 months, 3 years, 4 years, or 5 years.

[0318] E128. The LNP composition for use, or the method of any one of embodiments E120-E127, wherein the LNP composition is administered daily for at least 1 week, 2 weeks, 3 weeks, 4 weeks, 5 weeks, 6 weeks, 7 weeks, 8 weeks, 3 months, 4 months, 5 months, 6 months, 7 months, 8 months, 9 months, 10 months, 11 months, or 1 year.

[0319] E129. The LNP composition for use, or the method of any one of embodiments E120-E128, wherein the LNP composition is administered for at least 2, 3, 4, 5, or 6 consecutive days in a seven-day cycle, e.g., wherein the cycle is repeated about 1-20 times (e.g., 2-15, 5-10, 2-20, 5-20, 10-20, 15-20, 10-15, or 5-15 times).

[0320] E130. The LNP composition for use, or the method of any one of embodiments E120-E129, wherein the LNP composition is administered by a route of administration chosen from:
[0321] subcutaneous, intramuscular, intravenous, oral, intraocular, or rectal.

[0322] E131. The LNP composition for use, or the method of any one of embodiments E120-E130, wherein the LNP composition is administered at a dose of about 0.1-10 mg per kg (e.g., about 0.2-5 mg per kg, 0.5-2 mg per kg, 0.1-5 mg per kg, 0.1-2 mg per kg, 0.1-1 mg per kg, 0.1-0.5 mg per kg, 5-10 mg per kg, 2-10 mg per kg, 1-10 mg per kg, 0.5-10 mg per kg, or 0.2-10 mg per kg), e.g., about 0.2-1 mg per kg (e.g., about 0.5 mg per kg).

[0323] E132. The method or LNP composition for use of any one of embodiments E95-E131, further comprising administering an additional agent, e.g., a standard of care.

[0324] E133. The LNP composition for use, or the method of any one of embodiments E95-E132, wherein the composition or method results in suppression of T cell activity and/or function (e.g., T cell anergy, and/or T cell apoptosis) in a sample from the subject, e.g., as compared to T cell activity and/or function in an otherwise similar sample from a subject who has not been contacted with the LNP composition comprising a polynucleotide comprising an mRNA which encodes an ITB6 molecule.

[0325] E134. The LNP composition for use, or the method of embodiment E133, wherein suppression of T cell activity and/or function comprises any, one, two, three, four, five or all of the following:
[0326] (i) reduced donor immune cell (e.g., T cell) proliferation;
[0327] (ii) reduced weight loss, host B cell depletion, and/or donor immune cell (e.g., T cell) engraftment, optionally with concurrent Treg expansion;
[0328] (iii) reduced Tbet+ cells in T cell population (e.g., CD8+ T cell population);
[0329] (iv) reduced expression, activity and/or secretion of a proinflammatory cytokine (e.g., IFNg) in a sample; and/or
[0330] (v) maintained or increased Treg and/or host lymphocyte population.
[0331] (i) reduced level and/or activity of IFNg, e.g., secreted IFNg, in a sample;
[0332] (ii) reduction in T cell proliferation, survival and/or expansion;
[0333] (iii) increased T cell apoptosis;
[0334] (iv) reduction in expression and/or activity of a T cell transcription factor, e.g., T-bet;
[0335] (v) increase in and/or activation of T reg differentiation; and/or
[0336] (vi) an increase in the expression level of one or more of (e.g., 2, 3, 4, or 5) of PMEPA1, ITGAE/CD103, SMAD7, SKIL, and SKI.

[0337] E135. The LNP composition for use, or the method of embodiment E134, wherein the reduction in expression, activity, and/or secretion of a proinflammatory cytokine (e.g., IFNg) is about 1.2-10 fold (e.g., about 2-25-fold, 5-20-fold, 10-15-fold, 5-30-fold, 10-30-fold, 20-30-fold, 2-20-fold, 2-15-fold, or 2-10-fold).

[0338] E136. The LNP composition for use, or the method of embodiment E134 or E135, wherein the sample comprises immune cells, e.g., T cells, e.g., CD8 T cells.

[0339] E137. The LNP composition for use, or the method of any one of embodiments E134-E136, wherein the sample has been contacted with an immune cell, e.g., T cell, activating or stimulating agent.

[0340] E138. The LNP composition for use, or the method of embodiment E137, wherein the T cells, e.g., CD8 T cells, have been stimulated and/or activated, e.g., with a peptide or costimulatory molecule.

[0341] E139. The LNP composition for use, or the method of any one of embodiments E136-E138, wherein the CD8 T cells are antigen-specific.

[0342] E140. The LNP composition for use, or the method of any one of embodiments E136-E139, wherein the reduction in donor immune cell (e.g., T cell) proliferation is about 1.2-10 fold (e.g., about 2-25-fold, 5-20-fold, 10-15-fold, 5-30-fold, 10-30-fold, 20-30-fold, 2-20-fold, 2-15-fold, or 2-10-fold).

[0343] E141. The LNP composition for use, or the method of embodiment E140, wherein the reduction in donor immune cell (e.g., T cell) proliferation occurs upon: (a) co-culture of T cells with dendritic cells, e.g., CD11C+ cells, that have been contacted with an LNP composition comprising an ITB6 molecule; and/or (b) contact with a cytokine, e.g., TGFbeta.

[0344] E142. The LNP composition for use, or the method of embodiment E140 or E141, wherein reduction in Tbet+ cells is about 1.2-10 fold (e.g., about 2-25-fold, 5-20-fold, 10-15-fold, 5-30-fold, 10-30-fold, 20-30-fold, 2-20-fold, 2-15-fold, or 2-10-fold).

[0345] E143. The LNP composition for use, or the method of any one of embodiments E134-E142, wherein the reduction T-bet+ cells occurs upon co-culture of T cells with dendritic cells, e.g., CD11C+ cells, that have been contacted with an LNP composition comprising an ITB6 molecule.

[0346] E144. The LNP composition for use, or the method of any one of embodiments E134-E143, wherein the T cells comprise CD8+ T cells, CD4+ T cells, or T regulatory cells.

[0347] E145. The LNP composition for use, or the method of any one of embodiments E134-E144, wherein the method or composition reduces the level (e.g., expression) and/or activity of a costimulatory molecule, e.g., CD80, CD86, and/or MHCII, in a sample upon stimulation.

[0348] E146. The LNP composition for use, or the method of embodiment E145, wherein the reduction in level and/or activity of the costimulatory molecule is about 1.2-5-fold (e.g., about 2-4-fold, 2-5-fold, 2-3-fold, 3-5-fold, or 4-5-fold).

[0349] E147. The LNP composition for use, or the method of embodiment E145 or E146, wherein the sample has been contacted with a stimulant, e.g., LPS, or Poly IC.

[0350] E148. The LNP composition for use, or the method of any one of embodiments E145-E147, wherein the reduction in level and/or activity of the costimulatory molecule occurs in vitro or in vivo.

[0351] E149. The LNP composition for use, or the method of any one of embodiments E95-E133, wherein the disease with aberrant T cell function is graft vs host disease (GvHD).

[0352] E150. The LNP composition for use, or the method of embodiment E149, wherein the method or composition results in:
[0353] (i) reduced engraftment of donor cells, e.g., donor immune cells, e.g., T cells, in a subject or host, e.g., a human, rat or mouse;
[0354] (ii) reduction in the level, activity and/or secretion of IFNg from engrafted donor immune cells, e.g., T cells, in a subject or host, e.g., a human, rat or mouse; and/or
[0355] (iii) an absence of, prevention of, or delay in the onset of, graft vs host disease (GvHD) in a subject or a host, e.g., a human, rat or mouse.

[0356] E151. The LNP composition for use, or the method of embodiment E150, wherein the donor immune cells specified in (i) or (ii) comprise T cells, e.g., CD8+ T cells, CD4+ T cells, or T regulatory cells (e.g., CD25+ and/or FoxP3+ T cells).

[0357] E152. The LNP composition for use, or the method of embodiment E150 or E151, wherein the reduction in donor cell engraftment is about 1.5-30-fold (e.g., about 2-25-fold, 5-20-fold, 10-15-fold, 5-30-fold, 10-30-fold, 20-30-fold, 2-20-fold, 2-15-fold, or 2-10-fold).

[0358] E153. The LNP composition for use, or the method of any one of embodiments E150-E152, wherein the reduction in IFNg level, activity and/or secretion of IFNg is about 1.5-10-fold (e.g., about 2-25-fold, 5-20-fold, 10-15-fold, 5-30-fold, 10-30-fold, 20-30-fold, 2-20-fold, 2-15-fold, or 2-10-fold).

[0359] E154. The LNP composition for use, or the method of any one of embodiments E149-E153, wherein the delay in onset of GvHD is a delay of at least 1 week, 2 weeks, 3 weeks, 1 month, 2 months, 3 months, 4 months, 5 months, 6 months, 7 months, 8 months, 9 months, 10 months, 11 months, 12 months, 1.5 years, or 2 years.

[0360] E155. The LNP composition for use, or the method of any one of embodiments E149-E154, wherein any one of (i)-(iii) specified in embodiment E146 is compared to an otherwise similar host, e.g., a host that has not been contacted with the LNP composition comprising a polynucleotide comprising an mRNA which encodes an ITB6 molecule.

[0361] E156. The LNP composition for use, or the method of any one of embodiments E95-E133, wherein the disease with aberrant T cell function is arthritis, e.g., collagen-induced arthritis (CIA).

[0362] E157. The LNP composition for use, or the method of embodiment E156, wherein the method or composition results in amelioration or reduction of joint swelling, e.g., severity of joint swelling, e.g., as described herein, in a subject.

[0363] E158. The LNP composition for use, or the method of embodiment E156 or E157, wherein swelling is determined by an arthritis score, e.g., as described herein.

[0364] E159. The LNP composition for use, or the method of any one of embodiments E156-E158, wherein the reduction of joint swelling is compared to joint swelling in an otherwise similar subject, e.g., a subject who has not been contacted with the LNP composition comprising a polynucleotide comprising an mRNA which encodes an ITB6 molecule.

[0365] E160. The LNP composition for use, or the method of any one of embodiments E95-E133, wherein the disease with aberrant T cell function is colitis, e.g., dextran sulfate sodium (DSS)-induced colitis.

[0366] E161. The LNP composition for use, or the method of embodiment E160, wherein the method or composition results in:
[0367] (i) increased colon length in a subject; and/or
[0368] (ii) maintenance of body weight in a subject,
[0369] wherein the subject has, or is identified as having colitis, e.g., DSS induced colitis.

[0370] E162. The LNP composition for use, or the method of embodiment E160 or E161, wherein the colon length is increased by about 1.2-5-fold (e.g., about 2-4-fold, 2-5-fold, 2-3-fold, 3-5-fold, or 4-5-fold).

[0371] E163. The LNP composition for use, or the method of embodiment E160 or E161, wherein the change in colon length or body weight is compared to an otherwise similar subject, e.g., a subject who has not been contacted with the LNP composition comprising a polynucleotide comprising an mRNA which encodes an ITB6 molecule.

[0372] E164. The LNP composition for use, or the method of any one of embodiments E95-E133, wherein the disease with aberrant T cell function is diabetes, e.g., Type 1 diabetes (T1D).

[0373] E165. The LNP composition for use, or the method of embodiment E164, wherein the method or composition results in a reduction of blood glucose levels in a sample, e.g., a sample from a subject.

[0374] E166. The LNP composition for use, or the method of embodiment E164 or E165, wherein the reduction in blood glucose is at least 1.2-10-fold (e.g., about 2-25-fold, 5-20-fold, 10-15-fold, 5-30-fold, 10-30-fold, 20-30-fold, 2-20-fold, 2-15-fold, or 2-10-fold).

[0375] E167. The LNP composition for use, or the method of embodiment E164 or E165, wherein the reduction in blood glucose is compared to an otherwise similar subject, e.g., a subject who has not been contacted with the LNP composition comprising a polynucleotide comprising an mRNA which encodes an ITB6 molecule.

[0376] E168. The LNP composition for use, or the method of any one of embodiments E95-E167, wherein the polynucleotide comprising an mRNA encoding the ITB6 molecule, comprises at least one chemical modification.

[0377] E169. The LNP composition for use, or the method of E168, wherein the chemical modification is selected from the group consisting of pseudouridine, N1-methylpseudouridine, 2-thiouridine, 4′-thiouridine, 5-methylcytosine, 2-thio-1-methyl-1-deaza-pseudouridine, 2-thio-1-methyl-pseudouridine, 2-thio-5-aza-uridine, 2-thio-dihydropseudouridine, 2-thio-dihydrouridine, 2-thio-pseudouridine, 4-methoxy-2-thio-pseudouridine, 4-methoxy-pseudouridine, 4-thio-1-methyl-pseudouridine, 4-thio-pseudouridine, 5-aza-uridine, dihydropseudouridine, 5-methyluridine, 5-methyluridine, 5-methoxyuridine, and 2′-O-methyl uridine.

[0378] E170. The LNP composition for use, or the method of E168, wherein the chemical modification is selected from the group consisting of pseudouridine, N1-methylpseudouridine, 5-methylcytosine, 5-methoxyuridine, and a combination thereof.

[0379] E171. The LNP composition for use, or the method of E170, wherein the chemical modification is N1-methylpseudouridine.

[0380] E172. The LNP composition for use, or the method of any one of the preceding embodiments, wherein the mRNA in the lipid nanoparticle comprises fully modified N1-methylpseudouridine.

[0381] E173. The LNP composition for use, or the method of any one of the preceding embodiments, wherein the LNP composition comprises: (i) an ionizable lipid, e.g., an amino lipid; (ii) a sterol or other structural lipid; (iii) a non-cationic helper lipid or phospholipid; and (iv) a PEG-lipid.

[0382] E174. The LNP composition for use, or the method of embodiment E173, wherein the ionizable lipid comprises an amino lipid.

[0383] E175. The LNP composition for use, or the method of embodiment E173 or E174, wherein the ionizable lipid comprises a compound of any of Formulae (I), (I-a), (I-b), (I-c), (II), (II-a), (II-b), (II-c), (II-d), (II-e), (II-f), (II-g), (II-h), or (III).

[0384] E176. The LNP composition for use, or the method of any one of embodiments E173-E175, wherein the ionizable lipid comprises a compound of Formula (I).

[0385] E177. The LNP composition for use, or the method of any one of embodiments E173-E176, wherein the ionizable lipid comprises Compound 18, Compound 25, Compound 301, or Compound 357.

[0386] E178. The LNP composition for use or the method of any one of embodiments E173-E177, wherein the LNP comprises a molar ratio of about 20-60% ionizable lipid:5-25% phospholipid:25-55% cholesterol; and 0.5-15% PEG lipid.

[0387] E179. The LNP composition for use or the method of embodiment E178, wherein the LNP comprises a molar ratio of about 50% ionizable lipid:about 10% phospholipid:about 38.5% cholesterol; and about 1.5% PEG lipid.

[0388] E180. The LNP composition for use or the method of embodiment E178 or E179, wherein the LNP comprises a molar ratio of about 49.83% ionizable lipid:about 9.83% phospholipid:about 30.33% cholesterol; and about 2.0% PEG lipid.

[0389] E181. The LNP composition for use or the method of any one of embodiments E173-E180, wherein the ionizable lipid comprises a compound of any of Formulae (I), (I-a), (I-b), (I-c), (II), (II-a), (II-b), (II-c), (II-d), (II-e), (II-f), (II-g), (II-h), or (III).

[0390] E182. The LNP composition for use or the method of embodiment E181, wherein the ionizable lipid comprises a compound of Formula (I).

[0391] E183. The LNP composition for use or the method of embodiment E181 or E182, wherein the ionizable lipid comprises Compound 18, Compound 25, Compound 301, or Compound 357.

[0392] E184. The LNP composition for use, or the method of any one of embodiments E95-E183, which is formulated for intravenous, subcutaneous, intramuscular, intranasal, intraocular, rectal, or oral delivery.

[0393] E185. The LNP composition for use, or the method of any one of embodiments E95-E184, further comprising a pharmaceutically acceptable carrier or excipient.

[0394] E186. A kit comprising a container comprising the lipid nanoparticle (LNP) composition of any one of embodiments E1-E93, or the pharmaceutical composition of embodiment E91, and a package insert comprising instructions for administration of the lipid nanoparticle or pharmaceutical composition for treating or delaying a disease with aberrant T cell function in an individual.

[0395] E187. The kit of embodiment E186, wherein the lipid nanoparticle composition comprises a pharmaceutically acceptable carrier.

### BRIEF DESCRIPTIONS OF THE DRAWINGS

[0396] FIGS. 1A-1C depict ITB6 expression in murine bone marrow derived dendritic cell line (JAWSII). Constructs are tagged with the V5 epitope to facilitate detection. FIG. 1A is a graph showing ITB6 expression in mock transfected cells. FIG. 1B is a graph showing ITB6 expression in cells transfected with a mouse ITB6 mRNA construct. FIG. 1C is a graph showing ITB6 expression in cells transfected with a human ITB6 mRNA construct.

[0397] FIG. 2A provides representative flow cytometry graphs depicting the frequency of FOXP3-GFP-expressing cells in CD4+ T cells co-cultured with murine bone marrow derived dendritic cell line (JAWSII) transfected with an LNP formulated with a control mRNA (NTFIX, dOXL40), mouse ITB6 mRNA, or human ITB6 mRNA, with or without latent TGFβ.

[0398] FIG. 2B provides a graph depicting the frequency of GFP+ cells in live CD4+ cells co-cultured with murine bone marrow derived dendritic cells (JAWSII) transfected with an LNP formulated with a control mRNA (NTFIX, dOXL40), mouse ITB6 mRNA, or human ITB6 mRNA, with or without latent TGFβ.

[0399] FIGS. 3A-3B depicts the frequency and absolute cell counts of OTII (CD45.2+CD4+) cells in the spleen of mice (adoptively transferred with CFSE labeled OTH cells) without OVA treatment, with OVA-only treatment, or OVA plus LNP formulated with a control mRNA (dOXL40), mouse ITB6 mRNA, or human ITB6 mRNA. FIG. 3A is a graph showing the frequency of OTII (CD45.2+CD4+) cells in the spleen. FIG. 3B is a graph showing the absolute cell counts of OTH (CD45.2+CD4+) cells in the spleen.

[0400] FIGS. 3C-3D depict the frequency and absolute cell counts of OTII regulatory Tregs (CD25+Fox3+CD45.2+CD4+) in the spleen of mice (adoptively transferred with CFSE labeled OTH cells) without OVA treatment, with OVA-only treatment, or OVA plus treatment with an LNP formulated with a control mRNA (dOXL40), mouse ITB6 mRNA, or human ITB6 mRNA.

[0401] FIG. 3C is a graph showing the frequency of OTII Tregs (CD25+Fox3+CD45.2+CD4+) in the spleen. FIG. 3D is a graph showing the absolute cell counts of Tregs (CD25+Fox3+CD45.2+CD4+) in the spleen.

[0402] FIGS. 3E-3F depict CFSE dilution and the frequency of CFSE^{low} cells in the spleen of mice (adoptively transferred with CFSE labeled OTII cells) without OVA treatment, or treated with OVA only, or with OVA plus an LNP formulated with a control mRNA (dOXL40), mouse ITB6 mRNA, or human ITB6 mRNA. FIG. 3E provides representative histograms showing CFSE dilution as a measure of proliferation of OTII cells in the spleen. FIG. 3F is a graph showing the frequency of CFSE^{low} cells (cells that have undergone proliferation, diluting CFSE) in the spleen.

[0403] FIG. 4A-4B depict the frequency of OTH (CD45.2+CD4+) cells and Tregs (CD25+FoxP3+) in the spleen of mice (adoptively transferred with CFSE labeled RagKO-OTII cells) without OVA treatment, with OVA-only treatment, or treated with OVA plus an LNP formulated with a control mRNA (dOXL40), or mouse ITB6 mRNA. FIG. 4A provides a graph showing the frequency of total OTII (CD45.2+CD4+) cells in the spleen. FIG. 4B provides a graph showing the frequency of OTII Tregs (CD25+Fox3+CD45.2+CD4+) in the spleen.

[0404] FIGS. 4C-4D depict CFSE dilution and the frequency of CFSE^{low} cells in the spleen of mice (adoptively transferred with CFSE labeled RagKO-OTII cells) without OVA treatment, or treated with OVA only, or OVA with an LNP formulated with a control mRNA (dOXL40), or mouse ITB6 mRNA. FIG. 4C provides representative histograms showing CFSE dilution as a measure of proliferation of OTII cells in the spleen. FIG. 4D provides a graph showing the frequency of CFSE^{low} cells (cells that have undergone proliferation, diluting CFSE) in the spleen.

[0405] FIGS. 5A-5B depict the OTI CD8+ T cell response and the frequency of IFNγ+ cells in OTI (CD45.2+) cells upon peptide restimulation. FIG. 5A is a representative graph showing the frequency of IFNγ+ OTI CD8+ T cells after ex vivo restimulation with peptide (SIINFEKL), from mice with OVA-only treatment or treated with OVA plus a LNP formulated with mouse ITB6 mRNA. FIG. 5B is a graph showing the frequency of IFNγ+ cells in OTI (CD45.2+) cells from mice without OVA treatment, with OVA-only treatment, or treated with rapamycin, or with an LNP formulated with a control mRNA (dOXL40), mouse ITB6 mRNA, or human ITB6 mRNA.

[0406] FIGS. 6A-6B depict the body weight change in GvHD mice after treatment. FIG. 6A is a graph from one study showing the body weight change in naïve mice, or mice treated with PBS or an LNP formulated with a control mRNA (dOXL40), or mouse ITB6 mRNA. FIG. 6B is a graph from another study showing the body weight change in naïve mice, or mice treated with an LNP formulated with a control mRNA (dOXL40), mouse ITB6 mRNA, or human ITB6 mRNA.

[0407] FIGS. 6C-6D depict the frequency of B cells, CD4+ T cells, and CD8+ T cells in GvHD mice at Day 8 of treatment. FIG. 6C is a graph showing the frequency of total B cells, CD4+ T cells, and CD8+ T cells in the blood of naïve mice, or mice that received donor cells and treated with an LNP formulated with a control mRNA (dOXL40), mouse ITB6 mRNA, or human ITB6 mRNA. FIG. 6D is a graph showing the frequency of donor (H2-K^{b+}) B cells, CD4+ T cells, and CD8+ T cells in the blood of naïve mice, or mice treated with an LNP formulated with a control mRNA (dOXL40), mouse ITB6 mRNA, or human ITB6 mRNA.

[0408] FIGS. 7A-7B depict the frequency of B cells, CD4+ T cells, and CD8+ T cells in GvHD mice at Day 13 of treatment. FIG. 7A is a graph showing the frequency of total B cells, CD4+ T cells, and CD8+ T cells in the blood of naïve mice, or mice treated with an LNP formulated with a control mRNA (dOXL40), mouse ITB6 mRNA, or human ITB6 mRNA. FIG. 7B is a graph showing the frequency of donor (H2-K^{b+}) B cells, CD4+ cells, and CD8+ cells in the blood of naïve mice, or mice treated with an LNP formulated with a control mRNA (dOXL40), mouse ITB6 mRNA, or human ITB6 mRNA.

[0409] FIGS. 7C-7D depict the frequency of Tregs in GvHD mice at Day 8 and Day 13 of treatment. FIG. 7C is a graph showing the frequency of Tregs (CD25+Foxp3+) in the CD4+ T cell population of naïve mice, or mice treated with an LNP formulated with a control mRNA (dOXL40), mouse ITB6 mRNA, or human ITB6 mRNA, at Day 8. FIG. 7D is a graph showing the frequency of Tregs (CD25+Foxp3+) in the CD4+ T cell population in naïve mice, or mice treated with an LNP formulated with a control mRNA (dOXL40), mouse ITB6 mRNA, or human ITB6 mRNA, at Day 13.

[0410] FIGS. 8A-8C depict the frequency and absolute cell counts of B cells, CD4+ cells, and CD8+ cells in the spleen of GvHD mice at Day 15 of treatment. FIG. 8A is a graph showing the frequency of B cells, CD4+ cells, and CD8+ cells in the spleen of naïve mice, or mice treated with PBS, or with an LNP formulated with a control mRNA (dOXL40), mouse ITB6 mRNA, or human ITB6 mRNA. FIG. 8B is a graph showing the absolute cell counts of B cells, CD4+ cells, and CD8+ cells in the spleen of naïve mice, or mice treated with PBS, or with an LNP formulated with a control mRNA (dOXL40), mouse ITB6 mRNA, or human ITB6 mRNA. FIG. 8C is a graph showing the frequency of donor (H2-K^{b+}) B cells, CD4+ cells, and CD8+ cells in the spleen of naïve mice, or mice treated with PBS, or with an LNP formulated with a control mRNA (dOXL40), mouse ITB6 mRNA, or human ITB6 mRNA.

[0411] FIGS. 8D-8E depict the frequency of Tregs in the spleen of GvHD mice at Day 15 of treatment. FIG. 8D is a graph showing the frequency of Tregs (CD25+Foxp3+) in the spleen of naïve mice, or mice treated with PBS, or with an LNP formulated with a control mRNA (dOXL40), mouse ITB6 mRNA, or human ITB6 mRNA. FIG. 8E is a graph showing the absolute cell counts of Tregs (CD25+Foxp3+) in the spleen of naïve mice, or mice treated with PBS, or an LNP formulated with a control mRNA (dOXL40), mouse ITB6 mRNA, or human ITB6 mRNA.

[0412] FIGS. 9A-9E depicts the proliferation of donor and host cells in the spleen of GvHD mice at Day 15 of treatment as measured by Ki67 staining. FIG. 9A is a graph showing the frequency of Ki67 total B cells, CD4+ cells, and CD8+ cells in the spleen of naïve mice, or in mice treated with PBS, or with an LNP formulated with a control mRNA (dOXL40), mouse ITB6 mRNA, or human ITB6 mRNA. FIG. 9B is a representative graph showing the relative proliferation of donor and host cells in mice treated with PBS, or with an LNP formulated with mouse ITB6 mRNA as measured by Ki67 staining. FIG. 9C is a graph showing the frequency of Ki67 donor and host B cells in naïve mice, or in mice treated with PBS, or with an LNP formulated with a control mRNA (dOXL40), mouse ITB6 mRNA, or human ITB6 mRNA. FIG. 9D is a graph showing the frequency of Ki67 donor and host CD4+ T cells in naïve mice, or in mice treated with PBS, or with an LNP formulated with a control mRNA (dOXL40), mouse ITB6 mRNA, or human ITB6 mRNA. FIG. 9E is a graph showing the frequency of Ki67 donor and host CD8+ T cells in naïve mice, or in mice treated with PBS, or with an LNP formulated with a control mRNA (dOXL40), mouse ITB6 mRNA, or human ITB6 mRNA.

[0413] FIGS. 10A-10B depict the frequency of Tbet+ cells in the spleen of GvHD mice. FIG. 10A is a graph showing the frequency of Tbet+ cells in the CD8+ T cell population in naïve mice, or in mice treated with PBS, or with an LNP formulated with a control mRNA (dOXL40), mouse ITB6 mRNA, or human ITB6 mRNA. FIG. 10B is a graph showing the frequency of Tbet+ cells in the Tconv cell (CD25-Foxp3-CD4+) population in naïve mice, or in mice treated with PBS, or with an LNP formulated with a control mRNA (dOXL40), mouse ITB6 mRNA, or human ITB6 mRNA.

[0414] FIG. 11 depicts the day 15 serum levels of CXCL1, IFNγ, TNFα, MCP1, M1P1α, IL10, IL13, IL5, IL9, and M1P1β in naïve mice, or in GvHD mice treated with PBS, or with an LNP formulated with a control mRNA (dOXL40), mouse ITB6 mRNA, or human ITB6 mRNA.

[0415] FIGS. 12A-12D depicts the frequency and proliferation of B cells, CD4+ cells, and CD8+ cells, and the frequency of Tregs, in the spleen of GvHD mice at Day 22 of treatment. FIG. 12A is a graph showing the frequency of B cells, CD4+ cells, and CD8+ cells in the spleen of naïve mice, or in mice treated with PBS, or with an LNP formulated with a control mRNA (dOXL40), mouse ITB6 mRNA, or human ITB6 mRNA. FIG. 12B is a graph showing the frequency of donor (H2-K^{b+}) B cells, CD4+ cells, and CD8+ cells in the spleen of naïve mice, or in mice treated with PBS, or with an LNP formulated with a control mRNA (dOXL40), mouse ITB6 mRNA, or human ITB6 mRNA. FIG. 12C is a graph showing the frequency of Tregs (CD25+Foxp3+) in the CD4+ cell population in the spleen of naïve mice, or in mice treated with PBS, or with an LNP formulated with a control mRNA (dOXL40), mouse ITB6 mRNA, or human ITB6 mRNA. FIG. 12D is a graph showing the frequency of Ki67+ B cells, CD4+ cells, and CD8+ cells in the spleen of naïve mice, or in mice treated with PBS, or with an LNP formulated with a control mRNA (dOXL40), mouse ITB6 mRNA, or human ITB6 mRNA.

[0416] FIG. 13A is a table depicting the experimental groups for the NOD-scid-gamma (NSG) mice model of GvHD experiments.

[0417] FIG. 13B is a graph showing survival curves following treatment. Time of LNP treatment indicated by vertical arrows at top of graph.

[0418] FIG. 13C is a graph showing body weight changes over time.

[0419] FIG. 14 is a series of graphs showing % OTII (14A), % Tregs (14B), proliferation (14C-14E), and OTH (CD45.2+) proliferation and % of CFSEₗₒ population (14F) in the spleen of mice following treatment with an LNP formulated with human ITB6 mRNA.

[0420] FIG. 15 is a pair of graphs showing KLH-specific IgG in mice following treatment with an LNP formulated with human ITB6 mRNA.

[0421] FIG. 16 is a pair of graphs showing KLH-specific IgM in mice following treatment with an LNP formulated with human ITB6 mRNA.

[0422] FIG. 17 is a pair of graphs showing KLH-specific IgM in mice following treatment with an LNP formulated with human ITB6 mRNA.

[0423] FIG. 18 is a pair of graphs showing KLH-specific IgG in mice following treatment with an LNP formulated with human ITB6 mRNA.

[0424] FIG. 19 is a pair of graphs showing KLH-specific IgG in mice following treatment with an LNP formulated with human ITB6 mRNA.

[0425] FIG. 20 is a schematic and pair of graphs showing experimental design, % B cells in the spleen, and % H2-Kb+ donor cell sin the spleen of mice following treatment with an LNP formulated with human ITB6 mRNA.

[0426] FIG. 21 is a schematic and table showing experimental design.

[0427] FIG. 22 is a heatmap showing genes that changed after exposure to LNPs formulated with ITB6 mRNA compared to LNPs formulated with dOX40L.

[0428] FIG. 23 is a summary table showing the fold change and peak expression of several biomarker genes following treatment with LNPs formulated with ITB6 mRNA in mouse, rat, NHP, and human PBMCs.

[0429] FIGS. 24A and 24B are a pair of graphs showing mean clinical scores (FIG. 24A) and mean day disease onset (FIG. 24B) in a mouse model of EAE following treatment with vehicle, LNPs formulated with a dmOX40L control, or LNPs formulated with ITB6 mRNA.

### DETAILED DESCRIPTION

[0430] Without wishing to be bound by theory, it is believed that, in some embodiments, administration of an LNP comprising a polynucleotide comprising an mRNA which encodes an ITB6 molecule can result in suppression of T cells, e.g., reduction of T cell expansion, T cell proliferation, T cell anergy, and/or T cell apoptosis, e.g., by induction and/or proliferation of Treg cells. Exemplary inhibitory effects on T cells in vitro and in vivo with LNP compositions disclosed herein are provided at least in Examples 3-5 and effects on induction and/or proliferation of Treg cells are provided at least in Example 12. Exemplary protective in vivo effects of LNPs comprising ITB6 molecules are provided at least in Examples 6-11 (in a GvHD model) and Example 16 (in an EAE model).

[0431] Accordingly, the present disclosure provides, inter alia, LNP compositions comprising ITB6-encoding nucleic acid (e.g., mRNA) therapeutics. Also disclosed herein are methods of using such LNP compositions for inhibiting an immune response, or for treating or preventing a disease associated with an aberrant immune cell function, in a subject.

### Definitions

[0432] Acquiring: As used herein, “acquiring” refers to obtaining possession of a physical entity (e.g., a sample, polypeptide, or nucleic acid), or a value (e.g., a numerical value), by “directly acquiring” or “indirectly acquiring” the physical entity or value. “Directly acquiring” means performing a process (e.g., performing a synthetic or analytical method) to obtain the physical entity or value. “Indirectly acquiring” refers to receiving the physical entity or value from another party or source (e.g., a third-party laboratory that directly acquired the physical entity or value). Directly acquiring a physical entity includes performing a process that includes a physical change in a physical substance (e.g., a starting material). Exemplary changes include separating or purifying a substance, combining two or more separate entities into a mixture, or performing a chemical reaction that includes breaking or forming a covalent or non-covalent bond. Directly acquiring a value includes performing a process that includes a physical change in a sample or another substance, e.g., performing an analytical process which includes a physical change in a substance, e.g., a sample, analyte, or reagent, performing an analytical method, e.g., a method which includes one or more of the following: separating or purifying a substance, e.g., an analyte, or a fragment or other derivative thereof, from another substance; combining an analyte, or fragment or other derivative thereof, with another substance, e.g., a buffer, solvent, or reactant; or changing the structure of an analyte, or a fragment or other derivative thereof, e.g., by breaking or forming a covalent or non-covalent bond, between a first and a second atom of the analyte; or by changing the structure of a reagent, or a fragment or other derivative thereof, e.g., by breaking or forming a covalent or non-covalent bond, between a first and a second atom of the reagent.

[0433] Administering: As used herein, “administering” refers to a method of delivering a composition to a subject or patient. A method of administration may be selected to target delivery (e.g., to specifically deliver) to a specific region or system of a body. For example, an administration may be parenteral (e.g., subcutaneous, intracutaneous, intravenous, intraperitoneal, intramuscular, intraarticular, intraarterial, intrasynovial, intrasternal, intrathecal, intralesional, or intracranial injection, as well as any suitable infusion technique), oral, trans- or intra-dermal, interdermal, rectal, intravaginal, topical (e.g., by powders, ointments, creams, gels, lotions, and/or drops), mucosal, nasal, buccal, enteral, vitreal, intratumoral, sublingual, intranasal; by intratracheal instillation, bronchial instillation, and/or inhalation; as an oral spray and/or powder, nasal spray, and/or aerosol, and/or through a portal vein catheter. Preferred means of administration are intravenous or subcutaneous.

[0434] Approximately, about: As used herein, the terms “approximately” or “about,” as applied to one or more values of interest, refers to a value that is similar to a stated reference value. In certain embodiments, the term “approximately” or “about” refers to a range of values that fall within 25%, 20%, 19%, 18%, 17%, 16%, 15%, 14%, 13%, 12%, 11%, 10%, 9%, 8%, 7%, 6%, 5%, 4%, 3%, 2%, 1%, or less in either direction (greater than or less than) of the stated reference value unless otherwise stated or otherwise evident from the context (except where such number would exceed 100% of a possible value). For example, when used in the context of an amount of a given compound in a lipid component of an LNP, “about” may mean+/−5% of the recited value. For instance, an LNP including a lipid component having about 40% of a given compound may include 30-50% of the compound.

[0435] Biomarker: as used herein, the term “biomarker” refers to an indicator, e.g., a predictive and/or prognostic indicator, which can be detected in a sample (e.g., a gene) or derived from one or more indicators detected from a sample. The biomarker may serve as an indicator of efficacy of a therapy (e.g., therapy comprising an ITB6 mRNA) characterized by certain molecular, pathological, histological, and/or clinical features. In some embodiments, a biomarker is a gene.

[0436] In other embodiments, a biomarker is a collection of genes. Biomarkers include, but are not limited to, polynucleotides (e.g., DNA, and/or RNA), polynucleotide copy number alterations (e.g., DNA copy numbers), polypeptides, polypeptide and polynucleotide modifications (e.g. posttranslational modifications), carbohydrates, and/or glycolipid-based molecular markers.

[0437] Such biomarkers include, but are not limited to, PMEPA1, ITGAE/CD103, SMAD7, SKIL, and SKI.

[0438] PMEPA1: As used herein, “PMEPA1” refers to any native Prostate Transmembrane Protein, Androgen Induced 1 from any vertebrate source, including mammals such as primates (e.g., humans) and rodents (e.g., mice and rats), unless otherwise indicated. The term encompasses “full-length,” unprocessed PMEPA1 as well as any form of PMEPA1 that results from processing in the cell. The term also encompasses naturally occurring variants of PMEPA1, e.g., splice variants or allelic variants. PMEPA1 is also referred to in the art as STAG1, TMEPA1, Solid Tumor-Associated 1 Protein, and Transmembrane Prostate Androgen-Induced Protein. The nucleic acid sequence of an exemplary human PMEPA1 is shown under NCBI Reference Sequence: NG_031951.1. The amino acid sequence of an exemplary protein encoded by human PMEPA1 is shown under UniProt Accession No. Q969W9-1.

[0439] ITGAE: As used herein, “ITGAE” and “CD103” refer to any native Integrin Subunit Alpha E from any vertebrate source, including mammals such as primates (e.g., humans) and rodents (e.g., mice and rats), unless otherwise indicated. The term encompasses “full-length,” unprocessed ITGAE as well as any form of ITGAE that results from processing in the cell. The term also encompasses naturally occurring variants of ITGAE, e.g., splice variants or allelic variants. ITGAE is also referred to in the art as HUMINAE, Mucosal Lymphocyte 1 Antigen, Integrin Alpha-IEL, HML-1 Antigen, and CD103 Antigen. The nucleic acid sequence of an exemplary human ITGAE is shown under NCBI Reference Sequence: NC_000017.11. The amino acid sequence of an exemplary protein encoded by human ITGAE is shown under UniProt Accession No. P38570.

[0440] SMAD7: As used herein, “SMAD7” refers to any native SMAD Family Member 7 from any vertebrate source, including mammals such as primates (e.g., humans) and rodents (e.g., mice and rats), unless otherwise indicated. The term encompasses “full-length,” unprocessed SMAD7 as well as any form of SMAD7 that results from processing in the cell. The term also encompasses naturally occurring variants of SMAD7, e.g., splice variants or allelic variants. SMAD7 is also referred to in the art as SMAD Family Member 7, MADH7, MADH8, Mothers Against Decapentaplegic Homolog 7, MAD Homolog 7, MAD Homolog 8, HSMAD7, and CRCS3. The nucleic acid sequence of an exemplary human SMAD7 is shown under NCBI Reference Sequence: NM_005904.4. The amino acid sequence of an exemplary protein encoded by human SMAD7 is shown under UniProt Accession No. 015105.

[0441] SKIL: As used herein, “SKIL” refers to any native SKI Like Proto-Oncogene from any vertebrate source, including mammals such as primates (e.g., humans) and rodents (e.g., mice and rats), unless otherwise indicated. The term encompasses “full-length,” unprocessed SKIL as well as any form of SKIL that results from processing in the cell. The term also encompasses naturally occurring variants of SKIL, e.g., splice variants or allelic variants. SKIL is also referred to in the art as SKI Like Proto-Oncogene, SNO, SnoN, SnoA, Ski-Like Protein, Ski-Related Oncogene SnoN, and SnoI. The nucleic acid sequence of an exemplary human SKIL is shown under NCBI Reference Sequence: NM_005414.5. The amino acid sequence of an exemplary protein encoded by human SKIL is shown under UniProt Accession No. P12757.

[0442] SKI: As used herein, “SKI” refers to any native SKI Proto-Oncogene from any vertebrate source, including mammals such as primates (e.g., humans) and rodents (e.g., mice and rats), unless otherwise indicated. The term encompasses “full-length,” unprocessed SKI as well as any form of SKI that results from processing in the cell. The term also encompasses naturally occurring variants of SKI, e.g., splice variants or allelic variants. SKI is also referred to in the art as V-Ski Avian Sarcoma Viral Oncogene Homolog, Sloan-Kettering Institute Proto-Oncogene, Proto-Oncogene C-Ski, Ski Oncogene, SGS, and SKV. The nucleic acid sequence of an exemplary human SKI is shown under NCBI Reference Sequence: NM_003036.4. The amino acid sequence of an exemplary protein encoded by human SKI is shown under UniProt Accession No. P12755.

[0443] Conjugated: As used herein, the term “conjugated,” when used with respect to two or more moieties, means that the moieties are physically associated or connected with one another, either directly or via one or more additional moieties that serves as a linking agent, to form a structure that is sufficiently stable so that the moieties remain physically associated under the conditions in which the structure is used, e.g., physiological conditions. In some embodiments, two or more moieties may be conjugated by direct covalent chemical bonding. In other embodiments, two or more moieties may be conjugated by ionic bonding or hydrogen bonding.

[0444] Contacting: As used herein, the term “contacting” means establishing a physical connection between two or more entities. For example, contacting a cell with an mRNA or a lipid nanoparticle composition means that the cell and mRNA or lipid nanoparticle are made to share a physical connection. Methods of contacting cells with external entities both in vivo, in vitro, and ex vivo are well known in the biological arts. In exemplary embodiments of the disclosure, the step of contacting a mammalian cell with a composition (e.g., a nanoparticle, or pharmaceutical composition of the disclosure) is performed in vivo. For example, contacting a lipid nanoparticle composition and a cell (for example, a mammalian cell) which may be disposed within an organism (e.g., a mammal) may be performed by any suitable administration route (e.g., parenteral administration to the organism, including intravenous, intramuscular, intradermal, and subcutaneous administration). For a cell present in vitro, a composition (e.g., a lipid nanoparticle) and a cell may be contacted, for example, by adding the composition to the culture medium of the cell and may involve or result in transfection. Moreover, more than one cell may be contacted by a nanoparticle composition.

[0445] Delivering: As used herein, the term “delivering” means providing an entity to a destination. For example, delivering a therapeutic and/or prophylactic to a subject may involve administering an LNP including the therapeutic and/or prophylactic to the subject (e.g., by an intravenous, intramuscular, intradermal, or subcutaneous route). Administration of an LNP to a mammal or mammalian cell may involve contacting one or more cells with the lipid nanoparticle.

[0446] Detecting: The term “detecting” is used herein in the broadest sense to include both qualitative and quantitative measurements of a target molecule. Detecting includes identifying the mere presence of the target molecule in a sample as well as determining whether the target molecule is present in the sample at detectable levels. Detecting may be direct or indirect.

[0447] Encapsulate: As used herein, the term “encapsulate” means to enclose, surround, or encase. In some embodiments, a compound, polynucleotide (e.g., an mRNA), or other composition may be fully encapsulated, partially encapsulated, or substantially encapsulated. For example, in some embodiments, an mRNA of the disclosure may be encapsulated in a lipid nanoparticle, e.g., a liposome.

[0448] Encapsulation efficiency: As used herein, “encapsulation efficiency” refers to the amount of a therapeutic and/or prophylactic that becomes part of an LNP, relative to the initial total amount of therapeutic and/or prophylactic used in the preparation of an LNP. For example, if 97 mg of therapeutic and/or prophylactic are encapsulated in an LNP out of a total 100 mg of therapeutic and/or prophylactic initially provided to the composition, the encapsulation efficiency may be given as 97%. As used herein, “encapsulation” may refer to complete, substantial, or partial enclosure, confinement, surrounding, or encasement.

[0449] Effective amount: As used herein, the term “effective amount” of an agent is that amount sufficient to effect beneficial or desired results, for example, clinical results, and, as such, an “effective amount” depends upon the context in which it is being applied. For example, in the context of the amount of a target cell delivery potentiating lipid in a lipid composition (e.g., LNP) of the disclosure, an effective amount of a target cell delivery potentiating lipid is an amount sufficient to effect a beneficial or desired result as compared to a lipid composition (e.g., LNP) lacking the target cell delivery potentiating lipid. Non-limiting examples of beneficial or desired results effected by the lipid composition (e.g., LNP) include increasing the percentage of cells transfected and/or increasing the level of expression of a protein encoded by a nucleic acid associated with/encapsulated by the lipid composition (e.g., LNP). In the context of administering a target cell delivery potentiating lipid-containing lipid nanoparticle such that an effective amount of lipid nanoparticles are taken up by target cells in a subject, an effective amount of target cell delivery potentiating lipid-containing LNP is an amount sufficient to effect a beneficial or desired result as compared to an LNP lacking the target cell delivery potentiating lipid. Non-limiting examples of beneficial or desired results in the subject include increasing the percentage of cells transfected, increasing the level of expression of a protein encoded by a nucleic acid associated with/encapsulated by the target cell delivery potentiating lipid-containing LNP and/or increasing a prophylactic or therapeutic effect in vivo of a nucleic acid, or its encoded protein, associated with/encapsulated by the target cell delivery potentiating lipid-containing LNP, as compared to an LNP lacking the target cell delivery potentiating lipid. In some embodiments, a therapeutically effective amount of target cell delivery potentiating lipid-containing LNP is sufficient, when administered to a subject suffering from or susceptible to an infection, disease, disorder, and/or condition, to treat, improve symptoms of, diagnose, prevent, and/or delay the onset of the infection, disease, disorder, and/or condition. In another embodiment, an effective amount of a lipid nanoparticle is sufficient to result in expression of a desired protein in at least about 5%, 10%, 15%, 20%, 25% or more of target cells. For example, an effective amount of target cell delivery potentiating lipid-containing LNP can be an amount that results in transfection of at least 5%, 10%, 15%, 20%, 25%, 30%, or 35% of target cells after a single intravenous injection.

[0450] Expression: As used herein, “expression” of a nucleic acid sequence refers to one or more of the following events: (1) production of an RNA template from a DNA sequence (e.g., by transcription); (2) processing of an RNA transcript (e.g., by splicing, editing, 5′ cap formation, and/or 3′ end processing); (3) translation of an RNA into a polypeptide or protein; and (4) post-translational modification of a polypeptide or protein.

[0451] Expression level: The terms “level of expression” or “expression level” in general are used interchangeably and generally refer to the amount of a biomarker in a biological sample. An expression level for more than one gene of interest may be determined by aggregation methods known to one skilled in the art and also disclosed herein, including, for example, by calculating the median or mean of all the expression levels of the genes of interest. Before aggregation, the expression level of each gene of interest may be normalized by using statistical methods known to one skilled in the art and also disclosed herein, including, for example, normalized to the expression level of one or more housekeeping genes, or normalized to a total library size, or normalized to the median or mean expression level value across all genes measured. In some instances, before aggregation across multiple genes of interest, the normalized expression level of each gene of interest may be standardized by using statistical methods known to one skilled in the art and also disclosed herein, including, for example, by calculating the Z-score of the normalized expression level of each gene of interest.

[0452] Reference Expression Level: As used herein, the terms “reference expression level” and “reference level” are used interchangeably to refer to an expression level against which another expression level, e.g., the expression level of one or more genes described herein (e.g., any gene or combination of genes selected from PMEPA1, ITGAE/CD103, SMAD7, SKIL, and SKI) in a sample from an individual is compared, e.g., to make a diagnostic (e.g., predictive and/or prognostic) and/or therapeutic determination. For example, the reference expression level may be derived from expression levels in a reference population (e.g., the median expression level in a reference population, e.g., a population of patients having an autoimmune or inflammatory disease who have not been treated with an ITB6 mRNA therapy), a reference sample, and/or a pre-assigned value (e.g., a cut-off value which was previously determined to significantly (e.g., statistically significantly)) separate a first subset of individuals who exhibited disease progression and a second subset of individuals who did not exhibit disease progression, wherein the reference expression level significantly separates the first and second subsets of individuals based on a significant difference between the expression level in the first subset of individuals compared to that of the second subset of individuals. In some embodiments, the cut-off value may be the median or mean expression level in the reference population. In other embodiments, the reference level may be the top 40%, the top 30%, the top 20%, the top 10%, the top 5%, or the top 1% of the expression level in the reference population. In particular embodiments, the cut-off value may be the median expression level in the reference population. It will be appreciated by one skilled in the art that the numerical value for the reference expression level may vary depending on the indication or disorder, the methodology used to detect expression levels (e.g., RNA-seq, microarray analysis, or RT-qPCR), and/or the specific combinations of genes examined (e.g., any combination of the genes selected from PMEPA1, ITGAE/CD103, SMAD7, SKIL, and SKI).

[0453] Ex vivo: As used herein, the term “ex vivo” refers to events that occur outside of an organism (e.g., animal, plant, or microbe or cell or tissue thereof). Ex vivo events may take place in an environment minimally altered from a natural (e.g., in vivo) environment.

[0454] Fragment: A “fragment,” as used herein, refers to a portion. For example, fragments of proteins may include polypeptides obtained by digesting full-length protein isolated from cultured cells or obtained through recombinant DNA techniques. A fragment of a protein can be, for example, a portion of a protein that includes one or more functional domains such that the fragment of the protein retains the functional activity of the protein.

[0455] GC-rich: As used herein, the term “GC-rich” refers to the nucleobase composition of a polynucleotide (e.g., mRNA), or any portion thereof (e.g., an RNA element), comprising guanine (G) and/or cytosine (C) nucleobases, or derivatives or analogs thereof, wherein the GC-content is greater than about 50%. The term “GC-rich” refers to all, or to a portion, of a polynucleotide, including, but not limited to, a gene, a non-coding region, a 5′ UTR, a 3′ UTR, an open reading frame, an RNA element, a sequence motif, or any discrete sequence, fragment, or segment thereof which comprises about 50% GC-content. In some embodiments of the disclosure, GC-rich polynucleotides, or any portions thereof, are exclusively comprised of guanine (G) and/or cytosine (C) nucleobases.

[0456] GC-content: As used herein, the term “GC-content” refers to the percentage of nucleobases in a polynucleotide (e.g., mRNA), or a portion thereof (e.g., an RNA element), that are either guanine (G) and cytosine (C) nucleobases, or derivatives or analogs thereof, (from a total number of possible nucleobases, including adenine (A) and thymine (T) or uracil (U), and derivatives or analogs thereof, in DNA and in RNA). The term “GC-content” refers to all, or to a portion, of a polynucleotide, including, but not limited to, a gene, a non-coding region, a 5′ or 3′ UTR, an open reading frame, an RNA element, a sequence motif, or any discrete sequence, fragment, or segment thereof.

[0457] ITB6 molecule: As used herein, the term “ITB6 molecule” refers to a full length naturally occurring ITB6 (e.g., a mammalian ITB6, e.g., human ITB6, e.g., associated with UniProt: P18564; NCBI Gene ID: 3694) a fragment (e.g., a functional fragment) of ITB6, or a variant of ITB6 having at least 80%, 85%, 90%, 95%, 96%, 97%, 98%, or 99% sequence identity to: a naturally-occurring wild type ITB6 or a fragment (e.g., a functional fragment) thereof. In some embodiments, the ITB6 molecule is a ITGB6 gene product, e.g., an ITB6 polypeptide. In some embodiments, the variant, e.g., active variant, is a derivative, e.g., a mutant, of a wild type polypeptide. In some embodiments, the ITB6 variant, e.g., active variant of ITB6, has at least 50%, 60%, 70%, 80%, 85%, 90%, 95%, 96%, 97%, 98%, 99% or 100% activity of wild type ITB6 polypeptide. In some embodiments, the ITB6 molecule comprises a portion of ITB6 (e.g., an extracellular portion of ITB6) and a heterologous sequence, e.g., a sequence other than that of naturally occurring ITB6. In some embodiments, the ITB6 molecule comprises soluble ITB6.

[0458] Heterologous: As used herein, “heterologous” indicates that a sequence (e.g., an amino acid sequence or the polynucleotide that encodes an amino acid sequence or a non-coding region of a nucleic acid molecule) is not normally present in a given polypeptide or polynucleotide in nature. For example, an amino acid sequence that corresponds to a domain or motif of one protein may be heterologous to a second protein.

[0459] Isolated: As used herein, the term “isolated” refers to a substance or entity that has been separated from at least some of the components with which it was associated (whether in nature or in an experimental setting). Isolated substances may have varying levels of purity in reference to the substances from which they have been associated. Isolated substances and/or entities may be separated from at least about 10%, about 20%, about 30%, about 40%, about 50%, about 60%, about 70%, about 80%, about 90%, or more of the other components with which they were initially associated. In some embodiments, isolated agents are more than about 80%, about 85%, about 90%, about 91%, about 92%, about 93%, about 94%, about 95%, about 96%, about 97%, about 98%, about 99%, or more than about 99% pure. As used herein, a substance is “pure” if it is substantially free of other components.

[0460] Liposome: As used herein, by “liposome” is meant a structure including a lipid-containing membrane enclosing an aqueous interior. Liposomes may have one or more lipid membranes. Liposomes include single-layered liposomes (also known in the art as unilamellar liposomes) and multi-layered liposomes (also known in the art as multilamellar liposomes).

[0461] Modified: As used herein “modified” or “modification” refers to a changed state or a change in composition or structure of a polynucleotide (e.g., mRNA). Polynucleotides may be modified in various ways including chemically, structurally, and/or functionally. For example, polynucleotides may be structurally modified by the incorporation of one or more RNA elements, wherein the RNA element comprises a sequence and/or an RNA secondary structure(s) that provides one or more functions (e.g., translational regulatory activity). Accordingly, polynucleotides of the disclosure may be comprised of one or more modifications (e.g., may include one or more chemical, structural, or functional modifications, including any combination thereof).

[0462] Modified: As used herein “modified” refers to a changed state or structure of a molecule of the disclosure. Molecules may be modified in many ways including chemically, structurally, and functionally. In one embodiment, the mRNA molecules of the present disclosure are modified by the introduction of non-natural nucleosides and/or nucleotides, e.g., as it relates to the natural ribonucleotides A, U, G, and C. Noncanonical nucleotides such as the cap structures are not considered “modified” although they differ from the chemical structure of the A, C, G, U ribonucleotides.

[0463] mRNA: As used herein, an “mRNA” refers to a messenger ribonucleic acid. An mRNA may be naturally or non-naturally occurring. For example, an mRNA may include modified and/or non-naturally occurring components such as one or more nucleobases, nucleosides, nucleotides, or linkers. An mRNA may include a cap structure, a chain terminating nucleoside, a stem loop, a polyA sequence, and/or a polyadenylation signal. An mRNA may have a nucleotide sequence encoding a polypeptide. Translation of an mRNA, for example, in vivo translation of an mRNA inside a mammalian cell, may produce a polypeptide. Traditionally, the basic components of an mRNA molecule include at least a coding region, a 5′-untranslated region (5′-UTR), a 3′UTR, a 5′ cap and a polyA sequence.

[0464] Nanoparticle: As used herein, “nanoparticle” refers to a particle having any one structural feature on a scale of less than about 1000 nm that exhibits novel properties as compared to a bulk sample of the same material Routinely, nanoparticles have any one structural feature on a scale of less than about 500 nm, less than about 200 nm, or about 100 nm. Also, routinely nanoparticles have any one structural feature on a scale of from about 50 nm to about 500 nm, from about 50 nm to about 200 nm or from about 70 to about 120 nm. In exemplary embodiments, a nanoparticle is a particle having one or more dimensions of the order of about 1-1000 nm. In other exemplary embodiments, a nanoparticle is a particle having one or more dimensions of the order of about 10-500 nm. In other exemplary embodiments, a nanoparticle is a particle having one or more dimensions of the order of about 50-200 nm. A spherical nanoparticle would have a diameter, for example, of between about 50-100 or 70-120 nanometers. A nanoparticle most often behaves as a unit in terms of its transport and properties. It is noted that novel properties that differentiate nanoparticles from the corresponding bulk material typically develop at a size scale of under 1000 nm, or at a size of about 100 nm, but nanoparticles can be of a larger size, for example, for particles that are oblong, tubular, and the like. Although the size of most molecules would fit into the above outline, individual molecules are usually not referred to as nanoparticles.

[0465] Nucleic acid. As used herein, the term “nucleic acid” is used in its broadest sense and encompasses any compound and/or substance that includes a polymer of nucleotides. These polymers are often referred to as polynucleotides. Exemplary nucleic acids or polynucleotides of the disclosure include, but are not limited to, ribonucleic acids (RNAs), deoxyribonucleic acids (DNAs), DNA-RNA hybrids, RNAi-inducing agents, RNAi agents, siRNAs, shRNAs, miRNAs, antisense RNAs, ribozymes, catalytic DNA, RNAs that induce triple helix formation, threose nucleic acids (TNAs), glycol nucleic acids (GNAs), peptide nucleic acids (PNAs), locked nucleic acids (LNAs, including LNA having a β-D-ribo configuration, α-LNA having an α-L-ribo configuration (a diastereomer of LNA), 2′-amino-LNA having a 2′-amino functionalization, and 2′-amino-α-LNA having a 2′-amino functionalization) or hybrids thereof.

[0466] Nucleic Acid Structure: As used herein, the term “nucleic acid structure” (used interchangeably with “polynucleotide structure”) refers to the arrangement or organization of atoms, chemical constituents, elements, motifs, and/or sequence of linked nucleotides, or derivatives or analogs thereof, that comprise a nucleic acid (e.g., an mRNA). The term also refers to the two-dimensional or three-dimensional state of a nucleic acid. Accordingly, the term “RNA structure” refers to the arrangement or organization of atoms, chemical constituents, elements, motifs, and/or sequence of linked nucleotides, or derivatives or analogs thereof, comprising an RNA molecule (e.g., an mRNA) and/or refers to a two-dimensional and/or three dimensional state of an RNA molecule. Nucleic acid structure can be further demarcated into four organizational categories referred to herein as “molecular structure”, “primary structure”, “secondary structure”, and “tertiary structure” based on increasing organizational complexity.

[0467] Nucleobase: As used herein, the term “nucleobase” (alternatively “nucleotide base” or “nitrogenous base”) refers to a purine or pyrimidine heterocyclic compound found in nucleic acids, including any derivatives or analogs of the naturally occurring purines and pyrimidines that confer improved properties (e.g., binding affinity, nuclease resistance, chemical stability) to a nucleic acid or a portion or segment thereof. Adenine, cytosine, guanine, thymine, and uracil are the nucleobases predominately found in natural nucleic acids. Other natural, non-natural, and/or synthetic nucleobases, as known in the art and/or described herein, can be incorporated into nucleic acids.

[0468] Nucleoside Nucleotide: As used herein, the term “nucleoside” refers to a compound containing a sugar molecule (e.g., a ribose in RNA or a deoxyribose in DNA), or derivative or analog thereof, covalently linked to a nucleobase (e.g., a purine or pyrimidine), or a derivative or analog thereof (also referred to herein as “nucleobase”), but lacking an internucleoside linking group (e.g., a phosphate group). As used herein, the term “nucleotide” refers to a nucleoside covalently bonded to an internucleoside linking group (e.g., a phosphate group), or any derivative, analog, or modification thereof that confers improved chemical and/or functional properties (e.g., binding affinity, nuclease resistance, chemical stability) to a nucleic acid or a portion or segment thereof.

[0469] Open Reading Frame: As used herein, the term “open reading frame”, abbreviated as “ORF”, refers to a segment or region of an mRNA molecule that encodes a polypeptide. The ORF comprises a continuous stretch of non-overlapping, in-frame codons, beginning with the initiation codon and ending with a stop codon, and is translated by the ribosome.

[0470] Patient: As used herein, “patient” refers to a subject who may seek or be in need of treatment, requires treatment, is receiving treatment, will receive treatment, or a subject who is under care by a trained professional for a particular disease or condition. In particular embodiments, a patient is a human patient. In some embodiments, a patient is a patient suffering from an autoimmune disease, e.g., as described herein.

[0471] Pharmaceutically acceptable: The phrase “pharmaceutically acceptable” is employed herein to refer to those compounds, materials, compositions, and/or dosage forms which are, within the scope of sound medical judgment, suitable for use in contact with the tissues of human beings and animals without excessive toxicity, irritation, allergic response, or other problem or complication, commensurate with a reasonable benefit/risk ratio.

[0472] Pharmaceutically acceptable excipient: The phrase “pharmaceutically acceptable excipient,” as used herein, refers any ingredient other than the compounds described herein (for example, a vehicle capable of suspending or dissolving the active compound) and having the properties of being substantially nontoxic and non-inflammatory in a patient. Excipients may include, for example: antiadherents, antioxidants, binders, coatings, compression aids, disintegrants, dyes (colors), emollients, emulsifiers, fillers (diluents), film formers or coatings, flavors, fragrances, glidants (flow enhancers), lubricants, preservatives, printing inks, sorbents, suspensing or dispersing agents, sweeteners, and waters of hydration. Exemplary excipients include, but are not limited to: butylated hydroxytoluene (BHT), calcium carbonate, calcium phosphate (dibasic), calcium stearate, croscarmellose, crosslinked polyvinyl pyrrolidone, citric acid, crospovidone, cysteine, ethylcellulose, gelatin, hydroxypropyl cellulose, hydroxypropyl methylcellulose, lactose, magnesium stearate, maltitol, mannitol, methionine, methylcellulose, methyl paraben, microcrystalline cellulose, polyethylene glycol, polyvinyl pyrrolidone, povidone, pregelatinized starch, propyl paraben, retinyl palmitate, shellac, silicon dioxide, sodium carboxymethyl cellulose, sodium citrate, sodium starch glycolate, sorbitol, starch (corn), stearic acid, sucrose, talc, titanium dioxide, vitamin A, vitamin E, vitamin C, and xylitol.

[0473] Pharmaceutically acceptable salts: As used herein, “pharmaceutically acceptable salts” refers to derivatives of the disclosed compounds wherein the parent compound is modified by converting an existing acid or base moiety to its salt form (e.g., by reacting the free base group with a suitable organic acid). Examples of pharmaceutically acceptable salts include, but are not limited to, mineral or organic acid salts of basic residues such as amines; alkali or organic salts of acidic residues such as carboxylic acids; and the like. Representative acid addition salts include acetate, acetic acid, adipate, alginate, ascorbate, aspartate, benzenesulfonate, benzene sulfonic acid, benzoate, bisulfate, borate, butyrate, camphorate, camphorsulfonate, citrate, cyclopentanepropionate, digluconate, dodecylsulfate, ethanesulfonate, fumarate, glucoheptonate, glycerophosphate, hemisulfate, heptonate, hexanoate, hydrobromide, hydrochloride, hydroiodide, 2-hydroxy-ethanesulfonate, lactobionate, lactate, laurate, lauryl sulfate, malate, maleate, malonate, methanesulfonate, 2-naphthalenesulfonate, nicotinate, nitrate, oleate, oxalate, palmitate, pamoate, pectinate, persulfate, 3-phenylpropionate, phosphate, picrate, pivalate, propionate, stearate, succinate, sulfate, tartrate, thiocyanate, toluenesulfonate, undecanoate, valerate salts, and the like. Representative alkali or alkaline earth metal salts include sodium, lithium, potassium, calcium, magnesium, and the like, as well as nontoxic ammonium, quaternary ammonium, and amine cations, including, but not limited to ammonium, tetramethylammonium, tetraethylammonium, methylamine, dimethylamine, trimethylamine, triethylamine, ethylamine, and the like. The pharmaceutically acceptable salts of the present disclosure include the conventional non-toxic salts of the parent compound formed, for example, from non-toxic inorganic or organic acids. The pharmaceutically acceptable salts of the present disclosure can be synthesized from the parent compound which contains a basic or acidic moiety by conventional chemical methods. Generally, such salts can be prepared by reacting the free acid or base forms of these compounds with a stoichiometric amount of the appropriate base or acid in water or in an organic solvent, or in a mixture of the two; generally, nonaqueous media like ether, ethyl acetate, ethanol, isopropanol, or acetonitrile are preferred. Lists of suitable salts are found in Remington's Pharmaceutical Sciences, 17th ed., Mack Publishing Company, Easton, Pa., 1985, p. 1418, Pharmaceutical Salts: Properties, Selection, and Use, P. H. Stahl and C. G. Wermuth (eds.), Wiley-VCH, 2008, and Berge et al., Journal of Pharmaceutical Science, 66, 1-19 (1977), each of which is incorporated herein by reference in its entirety.

[0474] Polypeptide: As used herein, the term “polypeptide” or “polypeptide of interest” refers to a polymer of amino acid residues typically joined by peptide bonds that can be produced naturally (e.g., isolated or purified) or synthetically.

[0475] Responsiveness: “Responsiveness” or “effective response” can be assessed using any endpoint indicating a benefit to the individual and includes, without limitation, (i) inhibition, to some extent, of disease progression, including slowing down and complete arrest; (ii) reduction in the number of disease episodes and/or symptoms; (iii) reduction in lesional size; (iv) inhibition (i.e., reduction, slowing down or complete stopping) of disease cell infiltration into adjacent peripheral organs and/or tissues; (v) inhibition (i.e. reduction, slowing down or complete stopping) of disease spread; (vi) decrease of auto-immune response, which may, but does not have to, result in the regression or ablation of the disease lesion; (vii) relief, to some extent, of one or more symptoms associated with the disorder; (viii) increase in the length of disease-free presentation following treatment; and/or (ix) decreased mortality at a given point of time following treatment.

[0476] RNA: As used herein, an “RNA” refers to a ribonucleic acid that may be naturally or non-naturally occurring. For example, an RNA may include modified and/or non-naturally occurring components such as one or more nucleobases, nucleosides, nucleotides, or linkers. An RNA may include a cap structure, a chain terminating nucleoside, a stem loop, a polyA sequence, and/or a polyadenylation signal. An RNA may have a nucleotide sequence encoding a polypeptide of interest. For example, an RNA may be a messenger RNA (mRNA). Translation of an mRNA encoding a particular polypeptide, for example, in vivo translation of an mRNA inside a mammalian cell, may produce the encoded polypeptide. RNAs may be selected from the non-liming group consisting of small interfering RNA (siRNA), asymmetrical interfering RNA (aiRNA), microRNA (miRNA), Dicer-substrate RNA (dsRNA), small hairpin RNA (shRNA), mRNA, long non-coding RNA (lncRNA) and mixtures thereof.

[0477] RNA element: As used herein, the term “RNA element” refers to a portion, fragment, or segment of an RNA molecule that provides a biological function and/or has biological activity (e.g., translational regulatory activity). Modification of a polynucleotide by the incorporation of one or more RNA elements, such as those described herein, provides one or more desirable functional properties to the modified polynucleotide. RNA elements, as described herein, can be naturally occurring, non-naturally occurring, synthetic, engineered, or any combination thereof.

[0478] For example, naturally occurring RNA elements that provide a regulatory activity include elements found throughout the transcriptomes of viruses, prokaryotic and eukaryotic organisms (e.g., humans). RNA elements in particular eukaryotic mRNAs and translated viral RNAs have been shown to be involved in mediating many functions in cells. Exemplary natural RNA elements include, but are not limited to, translation initiation elements (e.g., internal ribosome entry site (IRES), see Kieft et al., (2001) RNA 7(2):194-206), translation enhancer elements (e.g., the APP mRNA translation enhancer element, see Rogers et al., (1999) J Biol Chem 274(10):6421-6431), mRNA stability elements (e.g., AU-rich elements (AREs), see Garneau et al., (2007) Nat Rev Mol Cell Biol 8(2):113-126), translational repression element (see e.g., Blumer et al., (2002) Mech Dev 110(1-2):97-112), protein-binding RNA elements (e.g., iron-responsive element, see Selezneva et al., (2013) J Mol Biol 425(18):3301-3310), cytoplasmic polyadenylation elements (Villalba et al., (2011) Curr Opin Genet Dev 21(4):452-457), and catalytic RNA elements (e.g., ribozymes, see Scott et al., (2009) Biochim Biophys Acta 1789(9-10):634-641).

[0479] Specific delivery: As used herein, the term “specific delivery,” “specifically deliver,” or “specifically delivering” means delivery of more (e.g., at least 10% more, at least 20% more, at least 30% more, at least 40% more, at least 50% more, at least 1.5 fold more, at least 2-fold more, at least 3-fold more, at least 4-fold more, at least 5-fold more, at least 6-fold more, at least 7-fold more, at least 8-fold more, at least 9-fold more, at least 10-fold more) of a therapeutic and/or prophylactic by a nanoparticle to a target cell of interest (e.g., mammalian target cell) compared to an off-target cell (e.g., non-target cells). The level of delivery of a nanoparticle to a particular cell may be measured by comparing the amount of protein produced in target cells versus non-target cells (e.g., by mean fluorescence intensity using flow cytometry, comparing the % of target cells versus non-target cells expressing the protein (e.g., by quantitative flow cytometry), comparing the amount of protein produced in a target cell versus non-target cell to the amount of total protein in said target cells versus non-target cell, or comparing the amount of therapeutic and/or prophylactic in a target cell versus non-target cell to the amount of total therapeutic and/or prophylactic in said target cell versus non-target cell. It will be understood that the ability of a nanoparticle to specifically deliver to a target cell need not be determined in a subject being treated, it may be determined in a surrogate such as an animal model (e.g., a mouse or NHP model).

[0480] Substantially: As used herein, the term “substantially” refers to the qualitative condition of exhibiting total or near-total extent or degree of a characteristic or property of interest. One of ordinary skill in the biological arts will understand that biological and chemical phenomena rarely, if ever, go to completion and/or proceed to completeness or achieve or avoid an absolute result. The term “substantially” is therefore used herein to capture the potential lack of completeness inherent in many biological and chemical phenomena.

[0481] Suffering from: An individual who is “suffering from” a disease, disorder, and/or condition has been diagnosed with or displays one or more symptoms of a disease, disorder, and/or condition.

[0482] Targeting moiety: As used herein, a “targeting moiety” is a compound or agent that may target a nanoparticle to a particular cell, tissue, and/or organ type.

[0483] Therapeutic Agent: The term “therapeutic agent” refers to any agent that, when administered to a subject, has a therapeutic, diagnostic, and/or prophylactic effect and/or elicits a desired biological and/or pharmacological effect.

[0484] Transfection: As used herein, the term “transfection” refers to methods to introduce a species (e.g., a polynucleotide, such as a mRNA) into a cell.

[0485] Subject: As used herein, the term “subject” refers to any organism to which a composition in accordance with the disclosure may be administered, e.g., for experimental, diagnostic, prophylactic, and/or therapeutic purposes. Typical subjects include animals (e.g., mammals such as mice, rats, rabbits, non-human primates, and humans) and/or plants. In some embodiments, a subject may be a patient.

[0486] Treating: As used herein, the term “treating” refers to partially or completely alleviating, ameliorating, improving, relieving, delaying onset of, inhibiting progression of, reducing severity of, and/or reducing incidence of one or more symptoms or features of a particular infection, disease, disorder, and/or condition. For example, “treating” cancer may refer to inhibiting survival, growth, and/or spread of a tumor. Treatment may be administered to a subject who does not exhibit signs of a disease, disorder, and/or condition and/or to a subject who exhibits only early signs of a disease, disorder, and/or condition for the purpose of decreasing the risk of developing pathology associated with the disease, disorder, and/or condition.

[0487] Preventing: As used herein, the term “preventing” refers to partially or completely inhibiting the onset of one or more symptoms or features of a particular infection, disease, disorder, and/or condition. In some embodiments, a therapy intended to prevent a disease may be given prophylactically (e.g., administered before onset of one or more symptoms).

[0488] Unmodified: As used herein, “unmodified” refers to any substance, compound, or molecule prior to being changed in any way. Unmodified may, but does not always, refer to the wild type or native form of a biomolecule. Molecules may undergo a series of modifications whereby each modified molecule may serve as the “unmodified” starting molecule for a subsequent modification.

[0489] Variant: As used herein, the term “variant” refers to a molecule having at least 50%, 60%, 70%, 80%, 85%, 90%, 95%, 96%, 97%, 98%, 99% or 100% activity of the wild type molecule, e.g., as measured by an art-recognized assay.

### ITB6 Molecules

[0490] ITB6 (also known as integrin beta 6) is a subunit of the heterodimeric integrin αvβ6, a membrane-spanning glycoprotein. In an aspect, the disclosure provides an LNP composition comprising a polynucleotide (e.g., an mRNA), e.g., encoding an ITB6 molecule, e.g., as described herein. In an embodiment, the ITB6 molecule comprises a naturally occurring ITB6 molecule, a fragment of a naturally occurring ITB6 molecule, or a variant thereof. In an embodiment, the ITB6 molecule comprises a variant of a naturally occurring ITB6 molecule (e.g., an ITB6 variant, e.g., as described herein), or a fragment thereof. In an embodiment, the LNP composition comprising a polynucleotide (e.g., an mRNA) encoding an ITB6 molecule can be administered alone or in combination with an additional agent, e.g., an LNP composition comprising a polynucleotide (e.g., an mRNA) encoding a different ITB6 variant or fragment thereof or an LNP composition comprising a polynucleotide (e.g., an mRNA) encoding a different molecule.

[0491] In an aspect, an LNP composition disclosed herein comprises a polynucleotide (e.g., an mRNA) encoding an ITB6 molecule. In an embodiment, the ITB6 molecule comprises a naturally occurring ITB6 molecule, a fragment of a naturally occurring ITB6 molecule, or a variant thereof. In an embodiment, the ITB6 molecule comprises an amino acid sequence having at least 85%, 90%, 95%, 96%, 97%, 98%, 99%, or 100% identity to an ITB6 amino acid sequence provided in Table 1A or Table 2A, e.g., any one of SEQ ID NOs: 17, 1, 7, 9, 11, 13, or 15, or a functional fragment thereof. In an embodiment, the ITB6 molecule comprises the amino acid sequence of an ITB6 amino acid sequence provided in Table 1A or Table 2A, e.g., any one of SEQ ID NOs: 17, 1, 7, 9, 11, 13, or 15, or a functional fragment thereof. In an embodiment, the ITB6 molecule comprises the amino acid sequence of any one of SEQ ID NOs: 17, 1, 7, 9, 11, 13, or 15 or a functional fragment thereof.

[0492] In some embodiments, the ITB6 molecule comprises an amino acid sequence having at least 85%, 90%, 95%, 96%, 97%, 98%, 99%, or 100% identity to, or differing by no more than 1, 2, 5, 10, 15, 20, 25, 30, 40, 50, 60, 70, 80, 90, or 100 amino acids from, an amino acid sequence lacking a leader sequence and/or an affinity tag (e.g., a leader sequence and/or an affinity tag described in Table 1A or Table 2A) but otherwise identical to an amino acid sequence of ITB6 provided in Table 1A or Table 2A, e.g., any one of SEQ ID NOs: 17, 1, 7, 9, 11, 13, or 15, or a functional fragment thereof.

[0493] In an embodiment, the polynucleotide (e.g., mRNA) encoding the ITB6 molecule comprises a nucleotide sequence having at least 85%, 90%, 95%, 96%, 97%, 98%, 99%, or 100% identity to, or differing by no more than 5, 10, 15, 20, 30, 40, 50, 60, 70, 80, 90, 100, 150, 200, 250, or 300 nucleotides from, a nucleotide sequence provided in Table 1A or Table 2A, e.g., any one of SEQ ID NOs: 18, 2-6, 8, 10, 12, 14, 16, or 160-175, or a functional fragment thereof. In an embodiment, the polynucleotide (e.g., mRNA) encoding the ITB6 molecule comprises the nucleotide sequence of SEQ ID NO: 18. In an embodiment, the polynucleotide (e.g., mRNA) encoding the ITB6 molecule comprises the nucleotide sequence of SEQ ID NO: 2. In an embodiment, the polynucleotide (e.g., mRNA) encoding the ITB6 molecule comprises the nucleotide sequence of SEQ ID NO: 3. In an embodiment, the polynucleotide (e.g., mRNA) encoding the ITB6 molecule comprises the nucleotide sequence of SEQ ID NO: 4. In an embodiment, the polynucleotide (e.g., mRNA) encoding the ITB6 molecule comprises the nucleotide sequence of SEQ ID NO: 5. In an embodiment, the polynucleotide (e.g., mRNA) encoding the ITB6 molecule comprises the nucleotide sequence of SEQ ID NO: 6. In an embodiment, the polynucleotide (e.g., mRNA) encoding the ITB6 molecule comprises the nucleotide sequence of SEQ ID NO: 8. In an embodiment, the polynucleotide (e.g., mRNA) encoding the ITB6 molecule comprises the nucleotide sequence of SEQ ID NO: 10. In an embodiment, the polynucleotide (e.g., mRNA) encoding the ITB6 molecule comprises the nucleotide sequence of SEQ ID NO: 12. In an embodiment, the polynucleotide (e.g., mRNA) encoding the ITB6 molecule comprises the nucleotide sequence of SEQ ID NO: 14. In an embodiment, the polynucleotide (e.g., mRNA) encoding the ITB6 molecule comprises the nucleotide sequence of SEQ ID NO: 16.

[0494] In some embodiments, the polynucleotide (e.g., mRNA) encoding the ITB6 molecule comprises a nucleic acid sequence having at least 85%, 90%, 95%, 96%, 97%, 98%, 99% or 100% identity to, or differing by no more than 5, 10, 15, 20, 30, 40, 50, 60, 70, 80, 90, 100, 150, 200, 250, or 300 nucleotides from, a nucleic acid sequence lacking a nucleotide sequence that encodes for a leader sequence and/or an affinity tag (e.g., a leader sequence and/or an affinity tag described in Table 1A or Table 2A) but otherwise identical to a nucleotide sequence provided in Table 1A or Table 2A, e.g., any one of SEQ ID NOs: 18, 2-6, 8, 10, 12, 14, 16, or 160-175, or a functional fragment thereof.

[0495] In an embodiment, the polynucleotide (e.g., mRNA) encoding the ITB6 molecule comprises a nucleotide sequence having at least 85%, 90%, 95%, 96%, 97%, 98%, 99%, or 100% identity to, or differing by no more than 5, 10, 15, 20, 30, 40, 50, 60, 70, 80, 90, or 100 nucleotides from, the sequence of SEQ ID NO: 18. In an embodiment, the polynucleotide (e.g., mRNA) encoding the ITB6 molecule comprises the nucleotide sequence of SEQ ID NO: 18. In some embodiments, the polynucleotide (e.g., mRNA) encoding the ITB6 molecule comprises the nucleotide sequence of SEQ ID NO: 175, which comprises from 5′ to 3′ end: the 5′ UTR sequence of SEQ ID NO: 50, the ORF sequence of SEQ ID NO:18, and the 3′ UTR sequence of SEQ ID NO: 142.

[0496] In some embodiments, the polynucleotide encoding the ITB6 molecule comprises from 5′ to 3′ end
[0497] (i) a 5′ cap such as provided herein, e.g., m⁷GpppG_{2′OMe}pA;
[0498] (ii) a 5′ UTR, such as the sequences provided herein, for example, SEQ ID NO:50;
[0499] (iii) an open reading frame encoding an ITB6 polypeptide, e.g., a sequence optimized nucleic acid sequence encoding ITB6 set forth as SEQ ID NO:18;
[0500] (iv) at least one stop codon (if not present at 5′ terminus of 3′UTR);
[0501] (v) a 3′ UTR, such as the sequences provided herein, for example, SEQ ID NO:142; and
[0502] (vi) a poly-A tail provided herein (e.g., SEQ ID NO:502).

[0503] In an embodiment, the polynucleotide (e.g., mRNA) encoding the ITB6 molecule comprises a nucleotide sequence having at least 85%, 90%, 95%, 96%, 97%, 98%, 99%, or 100% identity to, or differing by no more than 5, 10, 15, 20, 30, 40, 50, 60, 70, 80, 90, or 100 nucleotides from, the sequence of SEQ ID NO: 2. In an embodiment, the polynucleotide (e.g., mRNA) encoding the ITB6 molecule comprises the nucleotide sequence of SEQ ID NO: 2. In some embodiments, the polynucleotide (e.g., mRNA) encoding the ITB6 molecule comprises the nucleotide sequence of SEQ ID NO: 160, which comprises from 5′ to 3′ end: the 5′ UTR sequence of SEQ ID NO: 56, the ORF sequence of SEQ ID NO: 2, and the 3′ UTR sequence of SEQ ID NO: 110.

[0504] In some embodiments, the polynucleotide encoding the ITB6 molecule comprises from 5′ to 3′ end
[0505] (i) a 5′ cap such as provided herein, e.g., Cap C1;
[0506] (ii) a 5′ UTR, such as the sequences provided herein, for example, SEQ ID NO:56;
[0507] (iii) an open reading frame encoding an ITB6 polypeptide, e.g., a sequence optimized nucleic acid sequence encoding ITB6 set forth as SEQ ID NO: 2;
[0508] (iv) at least one stop codon (if not present at 5′ terminus of 3′UTR);
[0509] (v) a 3′ UTR, such as the sequences provided herein, for example, SEQ ID NO:110; and
[0510] (vi) a poly-A tail provided herein (e.g., SEQ ID NO:502).

[0511] In an embodiment, the polynucleotide (e.g., mRNA) encoding the ITB6 molecule comprises a nucleotide sequence having at least 85%, 90%, 95%, 96%, 97%, 98%, 99%, or 100% identity to, or differing by no more than 5, 10, 15, 20, 30, 40, 50, 60, 70, 80, 90, or 100 nucleotides from the sequence of SEQ ID NO: 3. In an embodiment, the polynucleotide (e.g., mRNA) encoding the ITB6 molecule comprises the nucleotide sequence of SEQ ID NO: 3. In some embodiments, the polynucleotide encoding the ITB6 molecule comprises the nucleotide sequence of SEQ ID NO: 161, which comprises from 5′ to 3′ end: the 5′ UTR sequence of SEQ ID NO: 50, the ORF sequence of SEQ ID NO: 3, and the 3′ UTR sequence of SEQ ID NO: 110.

[0512] In some embodiments, the polynucleotide encoding the ITB6 molecule comprises from 5′ to 3′ end
[0513] (i) a 5′ cap such as provided herein, e.g., Cap C1;
[0514] (ii) a 5′ UTR, such as the sequences provided herein, for example, SEQ ID NO:50;
[0515] (iii) an open reading frame encoding an ITB6 polypeptide, e.g., a sequence optimized nucleic acid sequence encoding ITB6 set forth as SEQ ID NO: 3;
[0516] (iv) at least one stop codon (if not present at 5′ terminus of 3′UTR);
[0517] (v) a 3′ UTR, such as the sequences provided herein, for example, SEQ ID NO: 110; and
[0518] (vi) a poly-A tail provided herein (e.g., SEQ ID NO:502).

[0519] In an embodiment, the polynucleotide (e.g., mRNA) encoding the ITB6 molecule comprises a nucleotide sequence having at least 85%, 90%, 95%, 96%, 97%, 98%, 99%, or 100% identity to, or differing by no more than 5, 10, 15, 20, 30, 40, 50, 60, 70, 80, 90, or 100 nucleotides from the sequence of SEQ ID NO: 4. In an embodiment, the polynucleotide (e.g., mRNA) encoding the ITB6 molecule comprises the nucleotide sequence of SEQ ID NO: 4. In some embodiments, the polynucleotide encoding the ITB6 molecule comprises the nucleotide sequence of SEQ ID NO: 162, which comprises from 5′ to 3′ end: the 5′ UTR sequence of SEQ ID NO: 50, ORF sequence of SEQ ID NO: 4, and the 3′ UTR sequence of SEQ ID NO: 143.

[0520] In some embodiments, the polynucleotide encoding the ITB6 molecule comprises from 5′ to 3′ end
[0521] (i) a 5′ cap such as provided herein, e.g., Cap C1;
[0522] (ii) a 5′ UTR, such as the sequences provided herein, for example, SEQ ID NO:50;
[0523] (iii) an open reading frame encoding an ITB6 polypeptide, e.g., a sequence optimized nucleic acid sequence encoding ITB6 set forth as SEQ ID NO: 4;
[0524] (iv) at least one stop codon (if not present at 5′ terminus of 3′UTR);
[0525] (v) a 3′ UTR, such as the sequences provided herein, for example, SEQ ID NO: 143; and
[0526] (vi) a poly-A tail provided herein (e.g., SEQ ID NO: 502).

[0527] In an embodiment, the polynucleotide (e.g., mRNA) encoding the ITB6 molecule comprises a nucleotide sequence having at least 85%, 90%, 95%, 96%, 97%, 98%, 99%, or 100% identity to, or differing by no more than 5, 10, 15, 20, 30, 40, 50, 60, 70, 80, 90, or 100 nucleotides from the sequence of SEQ ID NO: 5. In an embodiment, the polynucleotide (e.g., mRNA) encoding the ITB6 molecule comprises the nucleotide sequence of SEQ ID NO: 5. In some embodiments, the polynucleotide encoding the ITB6 molecule comprises the nucleotide sequence of SEQ ID NO: 163, which comprises from 5′ to 3′ end: the 5′ UTR sequence of SEQ ID NO: 50, the ORF sequence of SEQ ID NO: 5, and the 3′ UTR sequence of SEQ ID NO: 110.

[0528] In some embodiments, the polynucleotide encoding the ITB6 molecule comprises from 5′ to 3′ end
[0529] (i) a 5′ cap such as provided herein, e.g., Cap C1;
[0530] (ii) a 5′ UTR, such as the sequences provided herein, for example, SEQ ID NO: 50;
[0531] (iii) an open reading frame encoding an ITB6 polypeptide, e.g., a sequence optimized nucleic acid sequence encoding ITB6 set forth as SEQ ID NO: 5;
[0532] (iv) at least one stop codon (if not present at 5′ terminus of 3′UTR);
[0533] (v) a 3′ UTR, such as the sequences provided herein, for example, SEQ ID NO: 110; and
[0534] (vi) a poly-A tail provided herein (e.g., SEQ ID NO: 502).

[0535] In some embodiments, the polynucleotide (e.g., mRNA) encoding the ITB6 molecule comprises the nucleotide sequence of SEQ ID NO: 164, which comprises from 5′ to 3′ end: the 5′ UTR sequence of SEQ ID NO: 50, the ORF sequence of SEQ ID NO: 5, and the 3′ UTR sequence of SEQ ID NO: 144.

[0536] In some embodiments, the polynucleotide encoding the ITB6 molecule comprises from 5′ to 3′ end
[0537] (i) a 5′ cap such as provided herein, e.g., Cap C1;
[0538] (ii) a 5′ UTR, such as the sequences provided herein, for example, SEQ ID NO: 50;
[0539] (iii) an open reading frame encoding an ITB6 polypeptide, e.g., a sequence optimized nucleic acid sequence encoding ITB6 set forth as SEQ ID NO: 5;
[0540] (iv) at least one stop codon (if not present at 5′ terminus of 3′UTR);
[0541] (v) a 3′ UTR, such as the sequences provided herein, for example, SEQ ID NO: 144; and
[0542] (vi) a poly-A tail provided herein (e.g., SEQ ID NO: 502).

[0543] In some embodiments, the polynucleotide (e.g., mRNA) encoding the ITB6 molecule comprises the nucleotide sequence of SEQ ID NO: 169, which comprises from 5′ to 3′ end: the 5′ UTR sequence of SEQ ID NO: 50, the ORF sequence of SEQ ID NO: 5, and the 3′ UTR sequence of SEQ ID NO: 145.

[0544] In some embodiments, the polynucleotide encoding the ITB6 molecule comprises from 5′ to 3′ end
[0545] (i) a 5′ cap such as provided herein, e.g., Cap II-b;
[0546] (ii) a 5′ UTR, such as the sequences provided herein, for example, SEQ ID NO: 50;
[0547] (iii) an open reading frame encoding an ITB6 polypeptide, e.g., a sequence optimized nucleic acid sequence encoding ITB6 set forth as SEQ ID NO: 5;
[0548] (iv) at least one stop codon (if not present at 5′ terminus of 3′UTR);
[0549] (v) a 3′ UTR, such as the sequences provided herein, for example, SEQ ID NO: 145; and
[0550] (vi) a poly-A tail provided herein (e.g., SEQ ID NO: 502).

[0551] In an embodiment, the polynucleotide (e.g., mRNA) encoding the ITB6 molecule comprises a nucleotide sequence having at least 85%, 90%, 95%, 96%, 97%, 98%, 99%, or 100% identity to, or differing by no more than 5, 10, 15, 20, 30, 40, 50, 60, 70, 80, 90, or 100 nucleotides from the sequence of SEQ ID NO: 6. In an embodiment, the polynucleotide (e.g., mRNA) encoding the ITB6 molecule comprises the nucleotide sequence of SEQ ID NO: 6. In some embodiments, the polynucleotide encoding the ITB6 molecule comprises the nucleotide sequence of SEQ ID NO: 165, which comprises from 5′ to 3′ end: the 5′ UTR sequence of SEQ ID NO: 50, the ORF sequence of SEQ ID NO: 6, and the 3′ UTR sequence of SEQ ID NO: 110 In some embodiments, the polynucleotide encoding the ITB6 molecule comprises from 5′ to 3′ end
[0552] (i) a 5′ cap such as provided herein, e.g., Cap C1;
[0553] (ii) a 5′ UTR, such as the sequences provided herein, for example, SEQ ID NO: 50;
[0554] (iii) an open reading frame encoding an ITB6 polypeptide, e.g., a sequence optimized nucleic acid sequence encoding ITB6 set forth as SEQ ID NO: 6;
[0555] (iv) at least one stop codon (if not present at 5′ terminus of 3′UTR);
[0556] (v) a 3′ UTR, such as the sequences provided herein, for example, SEQ ID NO: 110; and
[0557] (vi) a poly-A tail provided herein (e.g., SEQ ID NO:502).

[0558] In some embodiments, the polynucleotide (e.g., mRNA) encoding the ITB6 molecule comprises the nucleotide sequence of SEQ ID NO: 166, which comprises from 5′ to 3′ end: the 5′ UTR sequence of SEQ ID NO: 50, the ORF sequence of SEQ ID NO: 6, and the 3′ UTR sequence of SEQ ID NO: 110.

[0559] In some embodiments, the polynucleotide encoding the ITB6 molecule comprises from 5′ to 3′ end
[0560] (i) a 5′ cap such as provided herein, e.g., Cap II-b;
[0561] (ii) a 5′ UTR, such as the sequences provided herein, for example, SEQ ID NO:50;
[0562] (iii) an open reading frame encoding an ITB6 polypeptide, e.g., a sequence optimized nucleic acid sequence encoding ITB6 set forth as SEQ ID NO: 6;
[0563] (iv) at least one stop codon (if not present at 5′ terminus of 3′UTR);
[0564] (v) a 3′ UTR, such as the sequences provided herein, for example, SEQ ID NO: 110; and
[0565] (vi) a poly-A tail provided herein (e.g., SEQ ID NO:502).

[0566] In some embodiments, the polynucleotide (e.g., mRNA) encoding the ITB6 molecule comprises the nucleotide sequence of SEQ ID NO: 167, which comprises from 5′ to 3′ end: the 5′ UTR sequence of SEQ ID NO: 50, the ORF sequence of SEQ ID NO: 6, and the 3′ UTR sequence of SEQ ID NO: 145.

[0567] In some embodiments, the polynucleotide encoding the ITB6 molecule comprises from 5′ to 3′ end
[0568] (i) a 5′ cap such as provided herein, e.g., Cap II-b;
[0569] (ii) a 5′ UTR, such as the sequences provided herein, for example, SEQ ID NO:50;
[0570] (iii) an open reading frame encoding an ITB6 polypeptide, e.g., a sequence optimized nucleic acid sequence encoding ITB6 set forth as SEQ ID NO: 6;
[0571] (iv) at least one stop codon (if not present at 5′ terminus of 3′UTR);
[0572] (v) a 3′ UTR, such as the sequences provided herein, for example, SEQ ID NO: 145; and
[0573] (vi) a poly-A tail provided herein (e.g., SEQ ID NO:502).

[0574] In some embodiments, the polynucleotide (e.g., mRNA) encoding the ITB6 molecule comprises the nucleotide sequence of SEQ ID NO: 168, which comprises from 5′ to 3′ end: the 5′ UTR sequence of SEQ ID NO: 50, the ORF sequence of SEQ ID NO: 6, and the 3′ UTR sequence of SEQ ID NO: 143.

[0575] In some embodiments, the polynucleotide encoding the ITB6 molecule comprises from 5′ to 3′ end
[0576] (i) a 5′ cap such as provided herein, e.g., Cap II-b;
[0577] (ii) a 5′ UTR, such as the sequences provided herein, for example, SEQ ID NO:50;
[0578] (iii) an open reading frame encoding an ITB6 polypeptide, e.g., a sequence optimized nucleic acid sequence encoding ITB6 set forth as SEQ ID NO: 6;
[0579] (iv) at least one stop codon (if not present at 5′ terminus of 3′UTR);
[0580] (v) a 3′ UTR, such as the sequences provided herein, for example, SEQ ID NO: 143; and
[0581] (vi) a poly-A tail provided herein (e.g., SEQ ID NO:502).

[0582] In an embodiment, the polynucleotide (e.g., mRNA) encoding the ITB6 molecule comprises a nucleotide sequence having at least 85%, 90%, 95%, 96%, 97%, 98%, 99%, or 100% identity to, or differing by no more than 5, 10, 15, 20, 30, 40, 50, 60, 70, 80, 90, or 100 nucleotides from the sequence of SEQ ID NO: 8. In an embodiment, the polynucleotide (e.g., mRNA) encoding the ITB6 molecule comprises the nucleotide sequence of SEQ ID NO: 8. In some embodiments, the polynucleotide encoding the ITB6 molecule comprises the nucleotide sequence of SEQ ID NO: 170, which comprises from 5′ to 3′ end: the 5′ UTR sequence of SEQ ID NO: 50, the ORF sequence of SEQ ID NO: 8, and the 3′ UTR sequence of SEQ ID NO: 110.

[0583] In some embodiments, the polynucleotide encoding the ITB6 molecule comprises from 5′ to 3′ end
[0584] (i) a 5′ cap such as provided herein, e.g., Cap C1;
[0585] (ii) a 5′ UTR, such as the sequences provided herein, for example, SEQ ID NO: 50;
[0586] (iii) an open reading frame encoding an ITB6 polypeptide, e.g., a sequence optimized nucleic acid sequence encoding ITB6 set forth as SEQ ID NO: 8;
[0587] (iv) at least one stop codon (if not present at 5′ terminus of 3′UTR);
[0588] (v) a 3′ UTR, such as the sequences provided herein, for example, SEQ ID NO: 110; and
[0589] (vi) a poly-A tail provided herein (e.g., SEQ ID NO:502).

[0590] In an embodiment, the polynucleotide (e.g., mRNA) encoding the ITB6 molecule comprises a nucleotide sequence having at least 85%, 90%, 95%, 96%, 97%, 98%, 99%, or 100% identity to, or differing by no more than 5, 10, 15, 20, 30, 40, 50, 60, 70, 80, 90, or 100 nucleotides from the sequence of SEQ ID NO: 10. In an embodiment, the polynucleotide (e.g., mRNA) encoding the ITB6 molecule comprises the nucleotide sequence of SEQ ID NO: 10. In some embodiments, the polynucleotide encoding the ITB6 molecule comprises the nucleotide sequence of SEQ ID NO: 171, which comprises from 5′ to 3′ end: the 5′ UTR sequence of SEQ ID NO: 50, the ORF sequence of SEQ ID NO: 10, and the 3′ UTR sequence of SEQ ID NO:
[0591] 110.

[0592] In some embodiments, the polynucleotide encoding the ITB6 molecule comprises from 5′ to 3′ end
[0593] (i) a 5′ cap such as provided herein, e.g., Cap C1;
[0594] (ii) a 5′ UTR, such as the sequences provided herein, for example, SEQ ID NO:50;
[0595] (iii) an open reading frame encoding an ITB6 polypeptide, e.g., a sequence optimized nucleic acid sequence encoding ITB6 set forth as SEQ ID NO: 10;
[0596] (iv) at least one stop codon (if not present at 5′ terminus of 3′UTR);
[0597] (v) a 3′ UTR, such as the sequences provided herein, for example, SEQ ID NO: 110; and
[0598] (vi) a poly-A tail provided herein (e.g., SEQ ID NO:502).

[0599] In an embodiment, the polynucleotide (e.g., mRNA) encoding the ITB6 molecule comprises a nucleotide sequence having at least 85%, 90%, 95%, 96%, 97%, 98%, 99%, or 100% identity to, or differing by no more than 5, 10, 15, 20, 30, 40, 50, 60, 70, 80, 90, or 100 nucleotides from the sequence of SEQ ID NO: 12. In an embodiment, the polynucleotide (e.g., mRNA) encoding the ITB6 molecule comprises the nucleotide sequence of SEQ ID NO: 12. In some embodiments, the polynucleotide encoding the ITB6 molecule comprises the nucleotide sequence of SEQ ID NO: 172, which comprises from 5′ to 3′ end: the 5′ UTR sequence of SEQ ID NO: 50, the ORF sequence of SEQ ID NO: 12, and the 3′ UTR sequence of SEQ ID NO: 110.

[0600] In some embodiments, the polynucleotide encoding the ITB6 molecule comprises from 5′ to 3′ end
[0601] (i) a 5′ cap such as provided herein, e.g., Cap C1;
[0602] (ii) a 5′ UTR, such as the sequences provided herein, for example, SEQ ID NO: 50;
[0603] (iii) an open reading frame encoding an ITB6 polypeptide, e.g., a sequence optimized nucleic acid sequence encoding ITB6 set forth as SEQ ID NO: 12;
[0604] (iv) at least one stop codon (if not present at 5′ terminus of 3′UTR);
[0605] (v) a 3′ UTR, such as the sequences provided herein, for example, SEQ ID NO: 110; and
[0606] (vi) a poly-A tail provided herein (e.g., SEQ ID NO:502).

[0607] In an embodiment, the polynucleotide (e.g., mRNA) encoding the ITB6 molecule comprises a nucleotide sequence having at least 85%, 90%, 95%, 96%, 97%, 98%, 99%, or 100% identity to, or differing by no more than 5, 10, 15, 20, 30, 40, 50, 60, 70, 80, 90, or 100 nucleotides from the sequence of SEQ ID NO: 14. In an embodiment, the polynucleotide (e.g., mRNA) encoding the ITB6 molecule comprises the nucleotide sequence of SEQ ID NO: 14. In some embodiments, the polynucleotide encoding the ITB6 molecule comprises the nucleotide sequence of SEQ ID NO: 173, which comprises from 5′ to 3′ end: the 5′ UTR sequence of SEQ ID NO: 50, the ORF sequence of SEQ ID NO: 14, and the 3′ UTR sequence of SEQ ID NO: 110.

[0608] In some embodiments, the polynucleotide encoding the ITB6 molecule comprises from 5′ to 3′ end
[0609] (i) a 5′ cap such as provided herein, e.g., Cap II-b;
[0610] (ii) a 5′ UTR, such as the sequences provided herein, for example, SEQ ID NO: 50;
[0611] (iii) an open reading frame encoding an ITB6 polypeptide, e.g., a sequence optimized nucleic acid sequence encoding ITB6 set forth as SEQ ID NO: 14;
[0612] (iv) at least one stop codon (if not present at 5′ terminus of 3′ UTR);
[0613] (v) a 3′ UTR, such as the sequences provided herein, for example, SEQ ID NO: 110; and
[0614] (vi) a poly-A tail provided herein (e.g., SEQ ID NO:502).

[0615] In an embodiment, the polynucleotide (e.g., mRNA) encoding the ITB6 molecule comprises a nucleotide sequence having at least 85%, 90%, 95%, 96%, 97%, 98%, 99%, or 100% identity to, or differing by no more than 5, 10, 15, 20, 30, 40, 50, 60, 70, 80, 90, or 100 nucleotides from the sequence of SEQ ID NO: 16. In an embodiment, the polynucleotide (e.g., mRNA) encoding the ITB6 molecule comprises the nucleotide sequence of SEQ ID NO: 16. In some embodiments, the polynucleotide encoding the ITB6 molecule comprises the nucleotide sequence of SEQ ID NO: 174, which comprises from 5′ to 3′ end: the 5′ UTR sequence of SEQ ID NO: 56, the ORF sequence of SEQ ID NO: 16, and the 3′ UTR sequence of SEQ ID NO: 110.

[0616] In some embodiments, the polynucleotide encoding the ITB6 molecule comprises from 5′ to 3′ end
[0617] (i) a 5′ cap such as provided herein, e.g., Cap C1;
[0618] (ii) a 5′ UTR, such as the sequences provided herein, for example, SEQ ID NO: 56;
[0619] (iii) an open reading frame encoding an ITB6 polypeptide, e.g., a sequence optimized nucleic acid sequence encoding ITB6 set forth as SEQ ID NO: 16;
[0620] (iv) at least one stop codon (if not present at 5′ terminus of 3′UTR);
[0621] (v) a 3′ UTR, such as the sequences provided herein, for example, SEQ ID NO: 110; and
[0622] (vi) a poly-A tail provided herein (e.g., SEQ ID NO:502).

[0623] In an embodiment, the polynucleotide (e.g., mRNA) encoding the ITB6 molecule further comprises one or more elements, e.g., a 5′ UTR and/or a 3′ UTR. In an embodiment, the 5′ UTR and/or 3′UTR comprise one or more micro-RNA (mIR) binding sites, e.g., as disclosed herein. Exemplary 5′ UTRs and 3′ UTRs are disclosed in the section entitled “5′ UTR and 3′UTR” herein.

[0624] In some embodiments, the polynucleotide encoding the ITB6 molecule comprises the nucleotide sequence of any of human variant 5.1, human variant 1.1, human variant 1.2, human variant 1.3, human variant 1.4, human variant 1.5, human variant 1.6, human variant 1.7, human variant 1.8, human variant 1.9, human variant 1.10, human variant 2.1, human variant 3.1, human variant 4.1, rat variant 1.1, or mouse variant 1.1, as described in Table 2A. In some embodiments, the polynucleotide encoding the ITB6 molecule comprises the chemical modification(s) shown in Table 2A for any of human variant 5.1, human variant 1.1, human variant 1.2, human variant 1.3, human variant 1.4, human variant 1.5, human variant 1.6, human variant 1.7, human variant 1.8, human variant 1.9, human variant 1.10, human variant 2.1, human variant 3.1, human variant 4.1, rat variant 1.1, or mouse variant 1.1. In some embodiments, the polynucleotide encoding the ITB6 molecule does not comprise the chemical modification(s) shown in Table 2A for any of human variant 5.1, human variant 1.1, human variant 1.2, human variant 1.3, human variant 1.4, human variant 1.5, human variant 1.6, human variant 1.7, human variant 1.8, human variant 1.9, human variant 1.10, human variant 2.1, human variant 3.1, human variant 4.1, rat variant 1.1, or mouse variant 1.1.

[0625] In an aspect, an LNP composition disclosed herein comprises a polynucleotide (e.g., mRNA) encoding an ITB6 molecule, e.g., as described herein. In an embodiment, the ITB6 molecule comprises a half-life extender, e.g., a protein (or fragment thereof) that binds to a serum protein such as albumin, IgG, FcRn or transferrin. In an embodiment, the half-life extender is an immunoglobulin Fc region or a variant thereof, e.g., an IgG1 Fc.

[0626] In an embodiment, an LNP composition described herein comprises a polynucleotide (e.g., mRNA) encoding an ITB6 molecule. In an embodiment, the ITB6 molecule further comprises a targeting moiety. In an embodiment, the targeting moiety comprises an antibody molecule (e.g., Fab or scFv), a receptor molecule (e.g., a receptor, a receptor fragment or functional variant thereof), a ligand molecule (e.g., a ligand, a ligand fragment or functional variant thereof), or a combination thereof.

TABLE 1A
Exemplary ITB6 sequences

| SEQ ID | Sequence | |
|---|---|---|
| NO | information | Sequence |
| 1 | Human ITB6 | MGIELLCLFFLFLGRNDHVQGGCALGGAETCEDCLLIGPQCAWCAQENFTHPS |
| | amino acid, | GVGERCDTPANLLAKGCQLNFIENPVSQVEILKNKPLSVGRQKNSSDIVQIAPQSL |
| | variant 1 | ILKLRPGGAQTLQVHVRQTEDYPVDLYYLMDLSASMDDDLNTIKELGSRLSKEMSK |
| | | LTSNFRLGFGSFVEKPVSPFVKTTPEEIANPCSSIPYFCLPTFGFKHILPLINDAE |
| | | RFNEIVKNQKISANIDTPEGGFDAIMQAAVCKEKIGWRNDSLHLLVFVSDADSHFG |
| | | MDSKLAGIVIPNDGLCHLDSKNEYSMSTVLEYPTIGQLIDKLVQNNVLLIFAVTQE |
| | | QVHLYENYAKLIPGATVGLLQKDSGNILQLIISAYEELRSEVELEVLGDTEGLNLS |
| | | FTAICNNGTLFQHQKKCSHMKVGDTASFSVTVNIPHCERRSRHIIIKPVGLGDALE |
| | | LLVSPECNCDCQKEVEVNSSKCHHGNGSFQCGVCACHPGHMGPRCECGEDMLSTDS |
| | | CKEAPDHPSCSGRGDCYCGQCICHLSPYGNIYGPYCQCDNFSCVRHKGLLCGGNGD |
| | | CDCGECVCRSGWTGEYCNCTTSTDSCVSEDGVLCSGRGDCVCGKCVCTNPGASGPT |
| | | CERCPTCGDPCNSKRSCIECHLSAAGQAREECVDKCKLAGATISEEEDFSKDGSVS |
| | | CSLQGENECLITFLITTDNEGKTIIHSINEKDCPKPPNIPMIMLGVSLAILLIGVV |
| | | LLCIWKLLVSFHDRKEVAKFEAERSKAKWQTGTNPLYRGSTSTFKNVTYKHREKQK |
| | | VDLSTDCGKPIPNPLLGLDST |
| 2 | Human ITB6 | AUGGGCAUCGAGCUGCUGUGCCUGUUCUUCCUGUUCCUGGGCAGAAACGACCA |
| | nucleotide, | CGUGCAGGGAGGUUGCGCCCUCGGAGGUGCCGAGACAUGCGAGGACUGCCUGCUGA |
| | variant 1 | UCGGCCCUCAGUGCGCCUGGUGCGCCCAGGAGAACUUCACCCACCCUAGCGGCGUG |
| | | GGCGAGAGGUGCGACACCCCUGCCAACCUGCUGGCCAAGGGCUGCCAGCUGAACUU |
| | | CAUCGAGAACCCUGUGAGCCAGGUGGAGAUCCUGAAGAACAAGCCUCUGAGCGUGG |
| | | GCAGACAGAAGAACAGCAGCGACAUCGUGCAGAUCGCCCCUCAGAGCCUGAUUUUG |
| | | AAGCUCCGGCCUGGAGGAGCACAGACCCUGCAGGUGCACGUGAGACAGACCGAGGA |
| | | CUACCCUGUGGACCUGUACUACCUGAUGGACCUGAGCGCCAGCAUGGACGACGACC |
| | | UGAACACCAUCAAGGAGCUGGGCAGCAGACUGAGCAAGGAGAUGAGCAAGCUGACC |
| | | AGCAACUUCAGACUGGGCUUCGGCAGCUUCGUGGAGAAGCCUGUAUCGCCUUUCGU |
| | | GAAGACCACCCCUGAGGAGAUCGCCAACCCUUGCAGCAGCAUCCCUUACUUCUGCC |
| | | UGCCUACCUUCGGCUUCAAGCACAUCCUGCCUCUGACCAACGACGCCGAGAGAUUC |
| | | AACGAGAUAGUUAAGAACCAGAAGAUCAGCGCCAACAUAGAUACUCCAGAAGGAGG |
| | | UUUCGACGCCAUCAUGCAGGCCGCCGUGUGUAAGGAGAAGAUCGGCUGGCGGAACG |
| | | ACAGCCUGCAUCUUUUGGUGUUCGUGAGUGACGCAGACAGCCACUUCGGCAUGGAC |
| | | UCUAAGUUAGCCGGCAUCGUGAUCCCUAACGACGGCCUGUGCCACCUGGACAGCAA |
| | | GAACGAGUACAGCAUGAGCACCGUGCUGGAGUACCCUACCAUCGGUCAGCUGAUCG |
| | | ACAAGCUGGUGCAGAACAACGUGCUGCUAAUCUUCGCCGUGACCCAGGAACAAGUC |
| | | CACCUGUACGAGAACUACGCCAAGCUGAUCCCUGGCGCCACCGUGGGCCUGCUGCA |
| | | GAAGGACAGCGGCAAUAUCUUGCAGUUGAUUAUUUCCGCAUACGAGGAGCUGAGAA |
| | | GCGAGGUGGAGCUGGAGGUGCUGGGCGACACCGAGGGCCUGAACCUGAGCUUCACC |
| | | GCCAUCUGCAACAACGGCACCCUGUUCCAGCAUCAGAAGAAGUGCAGCCACAUGAA |
| | | GGUGGGCGAUACAGCCAGCUUCAGCGUGACCGUGAACAUCCCUCACUGCGAGAGAA |
| | | GAAGCAGACACAUCAUCAUCAAGCCUGUGGGCCUUGGUGACGCCCUGGAACUGCUG |
| | | GUAUCACCAGAGUGCAACUGCGACUGUCAGAAGGAAGUGGAGGUUAACUCUUCUAA |
| | | GUGCCACCACGGCAACGGAAGUUUCCAGUGCGGCGUCUGUGCGUGCCACCCUGGCC |
| | | ACAUGGGCCCUCGAUGCGAGUGCGGAGAGGACAUGCUCUCUACUGACAGCUGUAAG |
| | | GAGGCCCCUGACCAUCCGAGUUGUAGCGGCAGAGGCGACUGCUACUGCGGCCAGUG |
| | | CAUCUGCCAUCUAUCUCCAUACGGAAAUAUCUACGGCCCUUACUGCCAGUGCGACA |
| | | AUUUCAGCUGCGUUAGACACAAGGGUCUUCUGUGUGGAGGAAACGGCGAUUGUGAU |
| | | UGCGGUGAGUGCGUGUGCAGAAGCGGCUGGACCGGCGAGUACUGCAAUUGCACCAC |
| | | CUCCACUGACAGCUGCGUGAGCGAGGACGGCGUGCUGUGCAGCGGACGGGGCGACU |
| | | GUGUUUGCGGCAAGUGUGUGUGCACCAAUCCUGGUGCUAGCGGCCCUACUUGCGAA |
| | | AGGUGCCCAACCUGUGGCGACCCGUGCAACUCCAAGAGAAGCUGCAUCGAGUGUCA |
| | | CCUAUCAGCUGCCGGCCAGGCCAGAGAGGAGUGUGUUGACAAGUGCAAGUUAGCUG |
| | | GAGCAACAAUCAGCGAGGAGGAGGACUUCAGCAAGGACGGCAGCGUGAGCUGUAGU |
| | | CUCCAAGGCGAGAACGAGUGCCUGAUCACCUUCCUGAUUACUACCGACAACGAGGG |
| | | CAAGACCAUCAUCCACUCCAUCAACGAGAAGGACUGUCCUAAGCCUCCUAAUAUCC |
| | | CUAUGAUCAUGCUUGGCGUGAGCCUGGCCAUUCUUCUGAUUGGAGUGGUGCUGCUC |
| | | UGUAUUUGGAAGCUACUGGUGAGCUUCCACGACAGAAAGGAAGUUGCCAAGUUCGA |
| | | GGCGGAAAGGAGCAAGGCCAAGUGGCAGACCGGCACUAACCCUCUGUACAGAGGAA |
| | | GUACCAGUACAUUCAAGAACGUGACCUACAAGCACAGAGAGAAGCAGAAGGUGGAU |
| | | CUUUCUACAGACUGCGGUAAGCCUAUCCCUAAUCCACUGUUGGGUUUGGAUUCCAC |
| | | C |
| 3 | Human ITB6 | AUGGGCAUCGAGCUGCUGUGCCUGUUCUUCCUGUUCCUGGGCAGAAACGACCACGU |
| | nucleotide 2, | GCAGGGAGGUUGCGCCCUCGGAGGUGCCGAGACAUGCGAGGACUGCCUGCUGAUCG |
| | variant 1 | GCCCUCAGUGCGCCUGGUGCGCCCAGGAGAACUUCACCCACCCUAGCGGCGUGGGC |
| | | GAGAGGUGCGACACCCCUGCCAACCUGCUGGCCAAGGGCUGCCAGCUGAACUUCAU |
| | | CGAGAACCCUGUGAGCCAGGUGGAGAUCCUGAAGAACAAGCCUCUGAGCGUGGGCA |
| | | GACAGAAGAACAGCAGCGACAUCGUGCAGAUCGCCCCUCAGAGCCUGAUUUUGAAG |
| | | CUCCGGCCUGGAGGAGCACAGACCCUGCAGGUGCACGUGAGACAGACCGAGGACUA |
| | | CCCUGUGGACCUGUACUACCUGAUGGACCUGAGCGCCAGCAUGGACGACGACCUGA |
| | | ACACCAUCAAGGAGCUGGGCAGCAGACUGAGCAAGGAGAUGAGCAAGCUGACCAGC |
| | | AACUUCAGACUGGGCUUCGGCAGCUUCGUGGAGAAGCCUGUAUCGCCUUUCGUGAA |
| | | GACCACCCCUGAGGAGAUCGCCAACCCUUGCAGCAGCAUCCCUUACUUCUGCCUGC |
| | | CUACCUUCGGCUUCAAGCACAUCCUGCCUCUGACCAACGACGCCGAGAGAUUCAAC |
| | | GAGAUAGUUAAGAACCAGAAGAUCAGCGCCAACAUAGAUACUCCAGAAGGAGGUUU |
| | | CGACGCCAUCAUGCAGGCCGCCGUGUGUAAGGAGAAGAUCGGCUGGCGGAACGACA |
| | | GCCUGCAUCUUUUGGUGUUCGUGAGUGACGCAGACAGCCACUUCGGCAUGGACUCU |
| | | AAGUUAGCCGGCAUCGUGAUCCCUAACGACGGCCUGUGCCACCUGGACAGCAAGAA |
| | | CGAGUACAGCAUGAGCACCGUGCUGGAGUACCCUACCAUCGGUCAGCUGAUCGACA |
| | | AGCUGGUGCAGAACAACGUGCUGCUAAUCUUCGCCGUGACCCAGGAACAAGUCCAC |
| | | CUGUACGAGAACUACGCCAAGCUGAUCCCUGGCGCCACCGUGGGCCUGCUGCAGAA |
| | | GGACAGCGGCAAUAUCUUGCAGUUGAUUAUUUCCGCAUACGAGGAGCUGAGAAGCG |
| | | AGGUGGAGCUGGAGGUGCUGGGCGACACCGAGGGCCUGAACCUGAGCUUCACCGCC |
| | | AUCUGCAACAACGGCACCCUGUUCCAGCAUCAGAAGAAGUGCAGCCACAUGAAGGU |
| | | GGGCGAUACAGCCAGCUUCAGCGUGACCGUGAACAUCCCUCACUGCGAGAGAAGAA |
| | | GCAGACACAUCAUCAUCAAGCCUGUGGGCCUUGGUGACGCCCUGGAACUGCUGGUA |
| | | UCACCAGAGUGCAACUGCGACUGUCAGAAGGAAGUGGAGGUUAACUCUUCUAAGUG |
| | | CCACCACGGCAACGGAAGUUUCCAGUGCGGCGUCUGUGCGUGCCACCCUGGCCACA |
| | | UGGGCCCUCGAUGCGAGUGCGGAGAGGACAUGCUCUCUACUGACAGCUGUAAGGAG |
| | | GCCCCUGACCAUCCGAGUUGUAGCGGCAGAGGCGACUGCUACUGCGGCCAGUGCAU |
| | | CUGCCAUCUAUCUCCAUACGGAAAUAUCUACGGCCCUUACUGCCAGUGCGACAAUU |
| | | UCAGCUGCGUUAGACACAAGGGUCUUCUGUGUGGAGGAAACGGCGAUUGUGAUUGC |
| | | GGUGAGUGCGUGUGCAGAAGCGGCUGGACCGGCGAGUACUGCAAUUGCACCACCUC |
| | | CACUGACAGCUGCGUGAGCGAGGACGGCGUGCUGUGCAGCGGACGGGGCGACUGUG |
| | | UUUGCGGCAAGUGUGUGUGCACCAAUCCUGGUGCUAGCGGCCCUACUUGCGAAAGG |
| | | UGCCCAACCUGUGGCGACCCGUGCAACUCCAAGAGAAGCUGCAUCGAGUGUCACCU |
| | | AUCAGCUGCCGGCCAGGCCAGAGAGGAGUGUGUUGACAAGUGCAAGUUAGCUGGAG |
| | | CAACAAUCAGCGAGGAGGAGGACUUCAGCAAGGACGGCAGCGUGAGCUGUAGUCUC |
| | | CAAGGCGAGAACGAGUGCCUGAUCACCUUCCUGAUUACUACCGACAACGAGGGCAA |
| | | GACCAUCAUCCACUCCAUCAACGAGAAGGACUGUCCUAAGCCUCCUAAUAUCCCUA |
| | | UGAUCAUGCUUGGCGUGAGCCUGGCCAUUCUUCUGAUUGGAGUGGUGCUGCUCUGU |
| | | AUUUGGAAGCUACUGGUGAGCUUCCACGACAGAAAGGAAGUUGCCAAGUUCGAGGC |
| | | GGAAAGGAGCAAGGCCAAGUGGCAGACCGGCACUAACCCUCUGUACAGAGGAAGUA |
| | | CCAGUACAUUCAAGAACGUGACCUACAAGCACAGAGAGAAGCAGAAGGUGGAUCUU |
| | | UCUACAGACUGCGGUAAGCCUAUCCCUAAUCCACUGUUGGGUUUGGAUUCCACC |
| 4 | Human ITB6 | AUGGGCAUCGAGCUGCUGUGCCUGUUCUUCCUGUUCCUGGGCAGAAACGACCACGU |
| | nucleotide 3, | GCAGGGAGGUUGCGCCCUCGGAGGUGCCGAGACAUGCGAGGACUGCCUGCUGAUCG |
| | variant 1 | GCCCUCAGUGCGCCUGGUGCGCCCAGGAGAACUUCACCCACCCUAGCGGCGUGGGC |
| | | GAGAGGUGCGACACCCCUGCCAACCUGCUGGCCAAGGGCUGCCAGCUGAACUUCAU |
| | | CGAGAACCCUGUGAGCCAGGUGGAGAUCCUGAAGAACAAGCCUCUGAGCGUGGGCA |
| | | GACAGAAGAACAGCAGCGACAUCGUGCAGAUCGCCCCUCAGAGCCUGAUUUUGAAG |
| | | CUCCGGCCUGGAGGAGCACAGACCCUGCAGGUGCACGUGAGACAGACCGAGGACUA |
| | | CCCUGUGGACCUGUACUACCUGAUGGACCUGAGCGCCAGCAUGGACGACGACCUGA |
| | | ACACCAUCAAGGAGCUGGGCAGCAGACUGAGCAAGGAGAUGAGCAAGCUGACCAGC |
| | | AACUUCAGACUGGGCUUCGGCAGCUUCGUGGAGAAGCCUGUAUCGCCUUUCGUGAA |
| | | GACCACCCCUGAGGAGAUCGCCAACCCUUGCAGCAGCAUCCCUUACUUCUGCCUGC |
| | | CUACCUUCGGCUUCAAGCACAUCCUGCCUCUGACCAACGACGCCGAGAGAUUCAAC |
| | | GAGAUAGUUAAGAACCAGAAGAUCAGCGCCAACAUAGAUACUCCAGAAGGAGGUUU |
| | | CGACGCCAUCAUGCAGGCCGCCGUGUGUAAGGAGAAGAUCGGCUGGCGGAACGACA |
| | | GCCUGCAUCUUUUGGUGUUCGUGAGUGACGCAGACAGCCACUUCGGCAUGGACUCU |
| | | AAGUUAGCCGGCAUCGUGAUCCCUAACGACGGCCUGUGCCACCUGGACAGCAAGAA |
| | | CGAGUACAGCAUGAGCACCGUGCUGGAGUACCCUACCAUCGGUCAGCUGAUCGACA |
| | | AGCUGGUGCAGAACAACGUGCUGCUAAUCUUCGCCGUGACCCAGGAACAAGUCCAC |
| | | CUGUACGAGAACUACGCCAAGCUGAUCCCUGGCGCCACCGUGGGCCUGCUGCAGAA |
| | | GGACAGCGGCAAUAUCUUGCAGUUGAUUAUUUCCGCAUACGAGGAGCUGAGAAGCG |
| | | AGGUGGAGCUGGAGGUGCUGGGCGACACCGAGGGCCUGAACCUGAGCUUCACCGCC |
| | | AUCUGCAACAACGGCACCCUGUUCCAGCAUCAGAAGAAGUGCAGCCACAUGAAGGU |
| | | GGGCGAUACAGCCAGCUUCAGCGUGACCGUGAACAUCCCUCACUGCGAGAGAAGAA |
| | | GCAGACACAUCAUCAUCAAGCCUGUGGGCCUUGGUGACGCCCUGGAACUGCUGGUA |
| | | UCACCAGAGUGCAACUGCGACUGUCAGAAGGAAGUGGAGGUUAACUCUUCUAAGUG |
| | | CCACCACGGCAACGGAAGUUUCCAGUGCGGCGUCUGUGCGUGCCACCCUGGCCACA |
| | | UGGGCCCUCGAUGCGAGUGCGGAGAGGACAUGCUCUCUACUGACAGCUGUAAGGAG |
| | | GCCCCUGACCAUCCGAGUUGUAGCGGCAGAGGCGACUGCUACUGCGGCCAGUGCAU |
| | | CUGCCAUCUAUCUCCAUACGGAAAUAUCUACGGCCCUUACUGCCAGUGCGACAAUU |
| | | UCAGCUGCGUUAGACACAAGGGUCUUCUGUGUGGAGGAAACGGCGAUUGUGAUUGC |
| | | GGUGAGUGCGUGUGCAGAAGCGGCUGGACCGGCGAGUACUGCAAUUGCACCACCUC |
| | | CACUGACAGCUGCGUGAGCGAGGACGGCGUGCUGUGCAGCGGACGGGGCGACUGUG |
| | | UUUGCGGCAAGUGUGUGUGCACCAAUCCUGGUGCUAGCGGCCCUACUUGCGAAAGG |
| | | UGCCCAACCUGUGGCGACCCGUGCAACUCCAAGAGAAGCUGCAUCGAGUGUCACCU |
| | | AUCAGCUGCCGGCCAGGCCAGAGAGGAGUGUGUUGACAAGUGCAAGUUAGCUGGAG |
| | | CAACAAUCAGCGAGGAGGAGGACUUCAGCAAGGACGGCAGCGUGAGCUGUAGUCUC |
| | | CAAGGCGAGAACGAGUGCCUGAUCACCUUCCUGAUUACUACCGACAACGAGGGCAA |
| | | GACCAUCAUCCACUCCAUCAACGAGAAGGACUGUCCUAAGCCUCCUAAUAUCCCUA |
| | | UGAUCAUGCUUGGCGUGAGCCUGGCCAUUCUUCUGAUUGGAGUGGUGCUGCUCUGU |
| | | AUUUGGAAGCUACUGGUGAGCUUCCACGACAGAAAGGAAGUUGCCAAGUUCGAGGC |
| | | GGAAAGGAGCAAGGCCAAGUGGCAGACCGGCACUAACCCUCUGUACAGAGGAAGUA |
| | | CCAGUACAUUCAAGAACGUGACCUACAAGCACAGAGAGAAGCAGAAGGUGGAUCUU |
| | | UCUACAGACUGCGGUAAGCCUAUCCCUAAUCCACUGUUGGGUUUGGAUUCCACC |
| 5 | Human ITB6 | AUGGGGAUCGAGCUGCUGUGCCUGUUCUUCCUGUUCCUGGGACGGAACGACCACGU |
| | nucleotide 4, | GCAGGGUGGCUGCGCCCUUGGUGGGGCAGAGACCUGCGAGGACUGCCUGCUCAUCG |
| | variant 1 | GCCCACAGUGCGCCUGGUGCGCUCAGGAGAACUUCACCCACCCCAGCGGAGUGGGC |
| | | GAGAGGUGCGACACCCCGGCCAACCUGCUGGCCAAGGGGUGCCAGCUGAACUUCAU |
| | | CGAGAACCCCGUCUCUCAGGUGGAGAUCCUGAAGAACAAGCCCCUCAGCGUUGGGC |
| | | GGCAGAAGAACAGCUCUGACAUCGUGCAGAUCGCGCCCCAGAGCCUGAUCCUGAAA |
| | | CUACGGCCUGGCGGUGCGCAAACCCUGCAGGUCCACGUGCGGCAGACCGAGGACUA |
| | | CCCUGUGGACCUGUACUACCUGAUGGACCUCUCCGCCAGCAUGGACGACGAUCUGA |
| | | ACACCAUCAAGGAGCUGGGCAGCCGCCUGAGCAAGGAGAUGUCCAAGCUGACCUCC |
| | | AACUUCCGCCUGGGGUUCGGAUCCUUCGUGGAGAAGCCCGUGAGCCCCUUCGUGAA |
| | | GACCACCCCUGAGGAGAUCGCCAACCCCUGCAGCAGCAUCCCUUACUUCUGCCUGC |
| | | CCACCUUCGGCUUCAAGCACAUCCUGCCACUGACCAACGACGCCGAGCGGUUCAAC |
| | | GAGAUCGUGAAGAACCAGAAGAUCAGCGCCAACAUCGACACCCCGGAGGGUGGGUU |
| | | CGACGCUAUCAUGCAGGCCGCCGUGUGCAAGGAGAAGAUCGGCUGGCGCAACGACA |
| | | GCCUGCACCUGCUGGUGUUCGUGUCCGACGCCGACUCCCACUUCGGCAUGGACAGC |
| | | AAGCUGGCCGGUAUCGUGAUCCCUAACGACGGCCUGUGCCACCUGGACAGCAAGAA |
| | | CGAGUACAGCAUGAGCACCGUGCUGGAGUACCCCACCAUCGGCCAGCUGAUCGACA |
| | | AGCUGGUGCAGAACAACGUGCUGCUGAUCUUCGCCGUGACCCAGGAGCAGGUGCAC |
| | | CUCUACGAGAACUACGCCAAGCUGAUUCCAGGCGCCACCGUCGGUCUGCUGCAGAA |
| | | GGACAGCGGCAACAUCCUGCAGCUGAUCAUCUCCGCCUACGAGGAGCUGAGGAGCG |
| | | AGGUGGAGCUGGAGGUGCUCGGGGACACCGAGGGCCUGAACCUGUCCUUCACCGCC |
| | | AUCUGCAACAACGGGACCCUCUUCCAGCACCAGAAGAAGUGCAGCCACAUGAAGGU |
| | | GGGCGACACCGCCAGCUUCAGCGUCACCGUGAACAUACCUCACUGUGAGCGGCGGA |
| | | GCAGGCACAUCAUCAUCAAGCCCGUGGGCCUGGGAGACGCCCUGGAGCUGCUGGUG |
| | | UCUCCCGAGUGCAACUGCGACUGCCAGAAGGAGGUGGAGGUGAACUCUAGCAAGUG |
| | | CCACCACGGCAACGGGAGUUUCCAGUGUGGCGUGUGUGCCUGCCACCCCGGUCACA |
| | | UGGGACCCCGGUGUGAGUGCGGGGAGGACAUGCUGAGCACCGACAGCUGCAAGGAG |
| | | GCCCCAGACCACCCGAGCUGUUCCGGUCGGGGCGACUGCUACUGCGGCCAGUGCAU |
| | | CUGUCACCUGAGCCCCUACGGCAACAUCUACGGGCCCUACUGCCAGUGCGACAACU |
| | | UCUCCUGCGUGCGCCACAAAGGCCUGCUGUGUGGCGGCAACGGCGACUGCGACUGC |
| | | GGGGAGUGCGUGUGCCGCAGUGGGUGGACCGGCGAGUACUGCAACUGCACCACCUC |
| | | CACCGACUCUUGCGUGUCCGAGGACGGGGUGCUGUGUUCCGGGCGCGGAGAUUGCG |
| | | UGUGCGGGAAGUGCGUGUGCACCAACCCUGGCGCAUCGGGUCCUACCUGCGAGAGG |
| | | UGCCCCACCUGUGGCGACCCCUGCAACAGCAAGCGCUCUUGCAUCGAGUGCCACCU |
| | | CUCAGCAGCAGGGCAGGCUCGGGAGGAGUGCGUGGACAAGUGCAAGCUCGCCGGCG |
| | | CCACCAUCAGUGAGGAGGAGGACUUCUCCAAGGACGGCAGCGUGUCCUGCUCCCUC |
| | | CAGGGCGAGAACGAGUGCCUCAUCACCUUCCUGAUCACCACCGACAACGAGGGCAA |
| | | GACCAUCAUCCACUCCAUCAACGAGAAGGACUGCCCCAAGCCGCCUAACAUCCCCA |
| | | UGAUCAUGCUGGGCGUGAGCCUGGCCAUCCUGCUGAUCGGCGUGGUGCUGCUGUGC |
| | | AUCUGGAAGCUGCUGGUCUCCUUCCACGACCGCAAGGAGGUGGCCAAGUUCGAGGC |
| | | CGAGCGCUCUAAGGCCAAGUGGCAGACCGGCACCAACCCUCUGUACCGGGGCUCCA |
| | | CCAGCACCUUCAAGAACGUGACCUACAAGCACCGCGAGAAGCAGAAGGUGGACCUG |
| | | UCCACCGACUGUGGCAAGCCCAUCCCCAAUCCCCUGCUGGGGCUGGACUCCACC |
| 6 | Human ITB6 | AUGGGUAUCGAGCUGCUGUGUCUGUUCUUUCUGUUUCUGGGCCGCAACGACCACGU |
| | nucleotide 6, | CCAGGGCGGCUGCGCCCUGGGGGGGGCCGAGACCUGCGAGGACUGCCUGCUCAUCG |
| | variant 1 | GGCCACAGUGUGCCUGGUGUGCACAGGAGAACUUCACCCACCCCAGCGGGGUGGGC |
| | | GAGAGGUGCGACACCCCUGCAAAUCUGCUGGCAAAGGGCUGCCAGCUGAAUUUCAU |
| | | CGAGAAUCCCGUCAGCCAGGUGGAGAUUCUCAAGAACAAGCCUCUGAGCGUCGGAC |
| | | GGCAGAAGAACUCUUCUGACAUCGUCCAGAUCGCACCUCAGAGCCUGAUUCUGAAG |
| | | CUCCGCCCAGGCGGAGCUCAGACCCUCCAGGUCCACGUCAGGCAGACUGAGGACUA |
| | | CCCCGUGGACCUGUACUACCUGAUGGAUCUGUCCGCCAGCAUGGACGACGAUCUGA |
| | | ACACCAUUAAGGAGCUGGGCAGCCGGCUCUCUAAGGAGAUGUCCAAGCUCACCAGC |
| | | AACUUCAGGCUGGGAUUCGGCAGCUUUGUCGAGAAGCCUGUGUCUCCUUUCGUGAA |
| | | GACCACACCAGAGGAGAUCGCAAACCCCUGUAGCAGCAUCCCCUACUUCUGCCUGC |
| | | CUACAUUCGGGUUCAAGCACAUUCUGCCUCUGACCAACGACGCAGAGCGCUUUAAC |
| | | GAGAUCGUGAAGAAUCAGAAGAUCAGCGCCAACAUUGAUACUCCUGAGGGGGGCUU |
| | | CGACGCCAUCAUGCAGGCUGCCGUCUGCAAGGAGAAGAUCGGGUGGAGGAACGACA |
| | | GCCUCCACCUGCUCGUGUUCGUGAGCGACGCCGACAGCCACUUUGGGAUGGACUCC |
| | | AAGCUGGCCGGCAUCGUGAUCCCCAACGACGGGCUGUGUCACCUCGAUUCCAAGAA |
| | | CGAGUACAGCAUGAGCACCGUGCUGGAGUACCCCACCAUUGGGCAGCUCAUUGAUA |
| | | AGCUCGUGCAGAACAACGUCCUGCUGAUCUUUGCAGUGACACAGGAGCAGGUGCAC |
| | | CUGUACGAGAAUUACGCAAAGCUCAUCCCCGGAGCCACUGUGGGCCUCCUGCAGAA |
| | | GGACUCCGGGAACAUCCUCCAGCUCAUCAUCUCCGCCUACGAGGAGCUGAGGAGCG |
| | | AGGUGGAGCUCGAGGUCCUCGGGGACACCGAGGGCCUCAACCUGAGCUUUACCGCC |
| | | AUCUGUAACAACGGAACUCUCUUCCAGCACCAGAAGAAGUGCUCUCACAUGAAGGU |
| | | GGGCGACACCGCCUCCUUCAGCGUGACCGUGAACAUCCCUCACUGUGAGCGGCGGA |
| | | GCCGCCACAUCAUCAUCAAGCCCGUGGGGCUCGGGGACGCCCUGGAGCUCCUGGUG |
| | | UCCCCUGAGUGUAACUGCGACUGCCAGAAGGAGGUCGAGGUGAACAGCUCUAAGUG |
| | | CCACCACGGCAACGGGAGCUUCCAGUGCGGGGUGUGCGCAUGCCACCCCGGCCACA |
| | | UGGGGCCUCGCUGCGAGUGCGGCGAGGACAUGCUGUCUACCGACAGCUGCAAGGAG |
| | | GCCCCUGACCACCCUAGCUGCUCUGGCCGCGGAGACUGCUACUGCGGCCAGUGCAU |
| | | CUGCCACCUGUCCCCUUACGGGAACAUUUACGGGCCCUACUGCCAGUGUGAUAACU |
| | | UUUCCUGCGUGCGGCACAAGGGCCUGCUGUGCGGAGGAAAUGGCGACUGCGACUGC |
| | | GGCGAGUGCGUCUGUCGCAGCGGCUGGACCGGGGAGUACUGCAACUGCACUACUUC |
| | | CACUGACAGCUGUGUCAGCGAGGACGGGGUGCUCUGUUCUGGCCGCGGGGACUGCG |
| | | UCUGCGGCAAGUGCGUGUGCACUAAUCCAGGGGCCUCCGGGCCCACCUGCGAGCGG |
| | | UGUCCCACCUGCGGGGACCCUUGCAACAGCAAGAGGUCCUGCAUCGAGUGCCACCU |
| | | GUCCGCCGCCGGACAGGCACGCGAGGAGUGCGUCGAUAAGUGUAAGCUCGCCGGAG |
| | | CUACAAUUAGCGAGGAGGAGGACUUCUCCAAGGACGGGAGCGUGAGCUGCUCCCUC |
| | | CAGGGAGAGAACGAGUGCCUGAUCACUUUCCUCAUCACCACUGAUAACGAGGGAAA |
| | | GACAAUCAUUCACUCUAUCAACGAGAAGGAUUGUCCCAAGCCCCCAAACAUUCCCA |
| | | UGAUCAUGCUGGGAGUGUCCCUGGCAAUCCUGCUGAUCGGAGUCGUGCUGCUCUGC |
| | | AUCUGGAAGCUGCUCGUCUCCUUCCACGACCGCAAGGAGGUCGCAAAGUUUGAGGC |
| | | CGAGCGGUCUAAGGCCAAGUGGCAGACAGGGACCAAUCCUCUCUACCGCGGGUCUA |
| | | CUUCUACCUUCAAGAACGUGACUUACAAGCACAGGGAGAAGCAGAAGGUGGACCUC |
| | | UCCACCGAUUGCGGGAAGCCCAUCCCCAAUCCCCUGCUGGGCCUGGACAGCACC |
| 7 | Human ITB6 | MGIELLCLFFLFLGRNDHVQGGCALGGAETCEDCLLIGPQCAWCAQENFTHPSGVG |
| | amino acid, | ERCDTPANLLAKGCQLNFIENPVSQVEILKNKPLSVGRQKNSSDIVQIAPQSLILK |
| | variant 2 | LRPGGAQTLQVHVRQTEDYPVDLYYLMDLSASMDDDLNTIKELGSRLSKEMSKLTS |
| | | NFRLGFGSFVEKPVSPFVKTTPEEIANPCSSIPYFCLPTFGFKHILPLINDAERFN |
| | | EIVKNQKISANIDAPEGGFDAIMQAAVCKEKIGWRNDSLHLLVFVSDADSHFGMDS |
| | | KLAGIVIPNDGLCHLDSKNEYSMSTVLEYPTIGQLIDKLVQNNVLLIFAVTQEQVH |
| | | LYENYAKLIPGATVGLLQKDSGNILQLIISAYEELRSEVELEVLGDTEGLNLSFTA |
| | | ICNNGTLFQHQKKCSHMKVGDTASFSVTVNIPHCERRSRHIIIKPVGLGDALELLV |
| | | SPECNCDCQKEVEVNSSKCHHGNGSFQCGVCACHPGHMGPRCECGEDMLSTDSCKE |
| | | APDHPSCSGRGDCYCGQCICHLSPYGNIYGPYCQCDNFSCVRHKGLLCGGNGDCDC |
| | | GECVCRSGWTGEYCNCTTSTDSCVSEDGVLCSGRGDCVCGKCVCTNPGASGPTCER |
| | | CPTCGDPCNSKRSCIECHLSAAGQAREECVDKCKLAGATISEEEDFSKDGSVSCSL |
| | | QGENECLITFLITTDNEGKTIIHSINEKDCPKPPNIPMIMLGVSLAILLIGVVLLC |
| | | IWKLLVSFHDRKEVAKFEAERSKAKWQTGTNPLYRGSTSTFKNVTYKHREKQKVDL |
| | | STDCGKPIPNPLLGLDST |
| 8 | Human ITB6 | AUGGGGAUCGAGCUGCUGUGCCUGUUCUUCCUGUUCCUGGGACGGAACGACCACGU |
| | nucleotide, | GCAGGGUGGCUGCGCCCUUGGUGGGGCAGAGACCUGCGAGGACUGCCUGCUCAUCG |
| | variant 2 | GCCCACAGUGCGCCUGGUGCGCUCAGGAGAACUUCACCCACCCCAGCGGAGUGGGC |
| | | GAGAGGUGCGACACCCCGGCCAACCUGCUGGCCAAGGGGUGCCAGCUGAACUUCAU |
| | | CGAGAACCCCGUCUCUCAGGUGGAGAUCCUGAAGAACAAGCCCCUCAGCGUUGGGC |
| | | GGCAGAAGAACAGCUCUGACAUCGUGCAGAUCGCGCCCCAGAGCCUGAUCCUGAAA |
| | | CUACGGCCUGGCGGUGCGCAAACCCUGCAGGUCCACGUGCGGCAGACCGAGGACUA |
| | | CCCUGUGGACCUGUACUACCUGAUGGACCUCUCCGCCAGCAUGGACGACGAUCUGA |
| | | ACACCAUCAAGGAGCUGGGCAGCCGCCUGAGCAAGGAGAUGUCCAAGCUGACCUCC |
| | | AACUUCCGCCUGGGGUUCGGAUCCUUCGUGGAGAAGCCCGUGAGCCCCUUCGUGAA |
| | | GACCACCCCUGAGGAGAUCGCCAACCCCUGCAGCAGCAUCCCUUACUUCUGCCUGC |
| | | CCACCUUCGGCUUCAAGCACAUCCUGCCACUGACCAACGACGCCGAGCGGUUCAAC |
| | | GAGAUCGUGAAGAACCAGAAGAUCAGCGCCAACAUCGACGCCCCGGAGGGUGGGUU |
| | | CGACGCUAUCAUGCAGGCCGCCGUGUGCAAGGAGAAGAUCGGCUGGCGCAACGACA |
| | | GCCUGCACCUGCUGGUGUUCGUGUCCGACGCCGACUCCCACUUCGGCAUGGACAGC |
| | | AAGCUGGCCGGUAUCGUGAUCCCUAACGACGGCCUGUGCCACCUGGACAGCAAGAA |
| | | CGAGUACAGCAUGAGCACCGUGCUGGAGUACCCCACCAUCGGCCAGCUGAUCGACA |
| | | AGCUGGUGCAGAACAACGUGCUGCUGAUCUUCGCCGUGACCCAGGAGCAGGUGCAC |
| | | CUCUACGAGAACUACGCCAAGCUGAUUCCAGGCGCCACCGUCGGUCUGCUGCAGAA |
| | | GGACAGCGGCAACAUCCUGCAGCUGAUCAUCUCCGCCUACGAGGAGCUGAGGAGCG |
| | | AGGUGGAGCUGGAGGUGCUCGGGGACACCGAGGGCCUGAACCUGUCCUUCACCGCC |
| | | AUCUGCAACAACGGGACCCUCUUCCAGCACCAGAAGAAGUGCAGCCACAUGAAGGU |
| | | GGGCGACACCGCCAGCUUCAGCGUCACCGUGAACAUACCUCACUGUGAGCGGCGGA |
| | | GCAGGCACAUCAUCAUCAAGCCCGUGGGCCUGGGAGACGCCCUGGAGCUGCUGGUG |
| | | UCUCCCGAGUGCAACUGCGACUGCCAGAAGGAGGUGGAGGUGAACUCUAGCAAGUG |
| | | CCACCACGGCAACGGGAGUUUCCAGUGUGGCGUGUGUGCCUGCCACCCCGGUCACA |
| | | UGGGACCCCGGUGUGAGUGCGGGGAGGACAUGCUGAGCACCGACAGCUGCAAGGAG |
| | | GCCCCAGACCACCCGAGCUGUUCCGGUCGGGGCGACUGCUACUGCGGCCAGUGCAU |
| | | CUGUCACCUGAGCCCCUACGGCAACAUCUACGGGCCCUACUGCCAGUGCGACAACU |
| | | UCUCCUGCGUGCGCCACAAAGGCCUGCUGUGUGGCGGCAACGGCGACUGCGACUGC |
| | | GGGGAGUGCGUGUGCCGCAGUGGGUGGACCGGCGAGUACUGCAACUGCACCACCUC |
| | | CACCGACUCUUGCGUGUCCGAGGACGGGGUGCUGUGUUCCGGGCGCGGAGAUUGCG |
| | | UGUGCGGGAAGUGCGUGUGCACCAACCCUGGCGCAUCGGGUCCUACCUGCGAGAGG |
| | | UGCCCCACCUGUGGCGACCCCUGCAACAGCAAGCGCUCUUGCAUCGAGUGCCACCU |
| | | CUCAGCAGCAGGGCAGGCUCGGGAGGAGUGCGUGGACAAGUGCAAGCUCGCCGGCG |
| | | CCACCAUCAGUGAGGAGGAGGACUUCUCCAAGGACGGCAGCGUGUCCUGCUCCCUC |
| | | CAGGGCGAGAACGAGUGCCUCAUCACCUUCCUGAUCACCACCGACAACGAGGGCAA |
| | | GACCAUCAUCCACUCCAUCAACGAGAAGGACUGCCCCAAGCCGCCUAACAUCCCCA |
| | | UGAUCAUGCUGGGCGUGAGCCUGGCCAUCCUGCUGAUCGGCGUGGUGCUGCUGUGC |
| | | AUCUGGAAGCUGCUGGUCUCCUUCCACGACCGCAAGGAGGUGGCCAAGUUCGAGGC |
| | | CGAGCGCUCUAAGGCCAAGUGGCAGACCGGCACCAACCCUCUGUACCGGGGCUCCA |
| | | CCAGCACCUUCAAGAACGUGACCUACAAGCACCGCGAGAAGCAGAAGGUGGACCUG |
| | | UCCACCGACUGUGGCAAGCCCAUCCCCAAUCCCCUGCUGGGGCUGGACUCCACC |
| 9 | Human ITB6 | MGIELLCLFFLFLGRNDHVQGGCALGGAETCEDCLLIGPQCAWCAQENFTHPSGVG |
| | amino acid, | ERCDTPANLLAKGCQLNFIENPVSQVEILKNKPLSVGRQKNSSDIVQIAPQSLILK |
| | variant 3 | LRPGGAQTLQVHVRQTEDYPVDLYYLMDLSYSMDDDLNTIKELGSRLSKEMSKLTS |
| | | NFRLGFGSFVEKPVSPFVKTTPEEIANPCSSIPYFCLPTFGFKHILPLINDAERFN |
| | | EIVKNQKISANIDAPEGGFDAIMQAAVCKEKIGWRNDSLHLLVFVSDADSHFGMDS |
| | | KLAGIVIPNDGLCHLDSKNEYSMSTVLEYPTIGQLIDKLVQNNVLLIFAVTQEQVH |
| | | LYENYAKLIPGATVGLLQKDSGNILQLIISAYEELRSEVELEVLGDTEGLNLSFTA |
| | | ICNNGTLFQHQKKCSHMKVGDTASFSVTVNIPHCERRSRHIIIKPVGLGDALELLV |
| | | SPECNCDCQKEVEVNSSKCHHGNGSFQCGVCACHPGHMGPRCECGEDMLSTDSCKE |
| | | APDHPSCSGRGDCYCGQCICHLSPYGNIYGPYCQCDNFSCVRHKGLLCGGNGDCDC |
| | | GECVCRSGWTGEYCNCTTSTDSCVSEDGVLCSGRGDCVCGKCVCTNPGASGPTCER |
| | | CPTCGDPCNSKRSCIECHLSAAGQAREECVDKCKLAGATISEEEDFSKDGSVSCSL |
| | | QGENECLITFLITTDNEGKTIIHSINEKDCPKPPNIPMIMLGVSLAILLIGVVLLC |
| | | IWKLLVSFHDRKEVAKFEAERSKAKWQTGTNPLYRGSTSTFKNVTYKHREKQKVDL |
| | | STDCGKPIPNPLLGLDST |
| 10 | Human ITB6 | AUGGGGAUCGAGCUGCUGUGCCUGUUCUUCCUGUUCCUGGGACGGAACGACCACGU |
| | nucleotide, | GCAGGGUGGCUGCGCCCUUGGUGGGGCAGAGACCUGCGAGGACUGCCUGCUCAUCG |
| | variant 3 | GCCCACAGUGCGCCUGGUGCGCUCAGGAGAACUUCACCCACCCCAGCGGAGUGGGC |
| | | GAGAGGUGCGACACCCCGGCCAACCUGCUGGCCAAGGGGUGCCAGCUGAACUUCAU |
| | | CGAGAACCCCGUCUCUCAGGUGGAGAUCCUGAAGAACAAGCCCCUCAGCGUUGGGC |
| | | GGCAGAAGAACAGCUCUGACAUCGUGCAGAUCGCGCCCCAGAGCCUGAUCCUGAAA |
| | | CUACGGCCUGGCGGUGCGCAAACCCUGCAGGUCCACGUGCGGCAGACCGAGGACUA |
| | | CCCUGUGGACCUGUACUACCUGAUGGACCUCUCCUACAGCAUGGACGACGAUCUGA |
| | | ACACCAUCAAGGAGCUGGGCAGCCGCCUGAGCAAGGAGAUGUCCAAGCUGACCUCC |
| | | AACUUCCGCCUGGGGUUCGGAUCCUUCGUGGAGAAGCCCGUGAGCCCCUUCGUGAA |
| | | GACCACCCCUGAGGAGAUCGCCAACCCCUGCAGCAGCAUCCCUUACUUCUGCCUGC |
| | | CCACCUUCGGCUUCAAGCACAUCCUGCCACUGACCAACGACGCCGAGCGGUUCAAC |
| | | GAGAUCGUGAAGAACCAGAAGAUCAGCGCCAACAUCGACGCCCCGGAGGGUGGGUU |
| | | CGACGCUAUCAUGCAGGCCGCCGUGUGCAAGGAGAAGAUCGGCUGGCGCAACGACA |
| | | GCCUGCACCUGCUGGUGUUCGUGUCCGACGCCGACUCCCACUUCGGCAUGGACAGC |
| | | AAGCUGGCCGGUAUCGUGAUCCCUAACGACGGCCUGUGCCACCUGGACAGCAAGAA |
| | | CGAGUACAGCAUGAGCACCGUGCUGGAGUACCCCACCAUCGGCCAGCUGAUCGACA |
| | | AGCUGGUGCAGAACAACGUGCUGCUGAUCUUCGCCGUGACCCAGGAGCAGGUGCAC |
| | | CUCUACGAGAACUACGCCAAGCUGAUUCCAGGCGCCACCGUCGGUCUGCUGCAGAA |
| | | GGACAGCGGCAACAUCCUGCAGCUGAUCAUCUCCGCCUACGAGGAGCUGAGGAGCG |
| | | AGGUGGAGCUGGAGGUGCUCGGGGACACCGAGGGCCUGAACCUGUCCUUCACCGCC |
| | | AUCUGCAACAACGGGACCCUCUUCCAGCACCAGAAGAAGUGCAGCCACAUGAAGGU |
| | | GGGCGACACCGCCAGCUUCAGCGUCACCGUGAACAUACCUCACUGUGAGCGGCGGA |
| | | GCAGGCACAUCAUCAUCAAGCCCGUGGGCCUGGGAGACGCCCUGGAGCUGCUGGUG |
| | | UCUCCCGAGUGCAACUGCGACUGCCAGAAGGAGGUGGAGGUGAACUCUAGCAAGUG |
| | | CCACCACGGCAACGGGAGUUUCCAGUGUGGCGUGUGUGCCUGCCACCCCGGUCACA |
| | | UGGGACCCCGGUGUGAGUGCGGGGAGGACAUGCUGAGCACCGACAGCUGCAAGGAG |
| | | GCCCCAGACCACCCGAGCUGUUCCGGUCGGGGCGACUGCUACUGCGGCCAGUGCAU |
| | | CUGUCACCUGAGCCCCUACGGCAACAUCUACGGGCCCUACUGCCAGUGCGACAACU |
| | | UCUCCUGCGUGCGCCACAAAGGCCUGCUGUGUGGCGGCAACGGCGACUGCGACUGC |
| | | GGGGAGUGCGUGUGCCGCAGUGGGUGGACCGGCGAGUACUGCAACUGCACCACCUC |
| | | CACCGACUCUUGCGUGUCCGAGGACGGGGUGCUGUGUUCCGGGCGCGGAGAUUGCG |
| | | UGUGCGGGAAGUGCGUGUGCACCAACCCUGGCGCAUCGGGUCCUACCUGCGAGAGG |
| | | UGCCCCACCUGUGGCGACCCCUGCAACAGCAAGCGCUCUUGCAUCGAGUGCCACCU |
| | | CUCAGCAGCAGGGCAGGCUCGGGAGGAGUGCGUGGACAAGUGCAAGCUCGCCGGCG |
| | | CCACCAUCAGUGAGGAGGAGGACUUCUCCAAGGACGGCAGCGUGUCCUGCUCCCUC |
| | | CAGGGCGAGAACGAGUGCCUCAUCACCUUCCUGAUCACCACCGACAACGAGGGCAA |
| | | GACCAUCAUCCACUCCAUCAACGAGAAGGACUGCCCCAAGCCGCCUAACAUCCCCA |
| | | UGAUCAUGCUGGGCGUGAGCCUGGCCAUCCUGCUGAUCGGCGUGGUGCUGCUGUGC |
| | | AUCUGGAAGCUGCUGGUCUCCUUCCACGACCGCAAGGAGGUGGCCAAGUUCGAGGC |
| | | CGAGCGCUCUAAGGCCAAGUGGCAGACCGGCACCAACCCUCUGUACCGGGGCUCCA |
| | | CCAGCACCUUCAAGAACGUGACCUACAAGCACCGCGAGAAGCAGAAGGUGGACCUG |
| | | UCCACCGACUGUGGCAAGCCCAUCCCCAAUCCCCUGCUGGGGCUGGACUCCACC |
| 11 | Human ITB6 | MGIELLCLFFLFLGRNDHVQGGCALGGAETCEDCLLIGPQCAWCAQENFTHPSGVG |
| | amino acid, | ERCDTPANLLAKGCQLNFIENPVSQVEILKNKPLSVGRQKNSSDIVQIAPQSLILK |
| | variant 4 | LRPGGAQTLQVHVRQTEDYPVDLYYLMDLSYSMDDDLNTIKELGSRLSKEMSKLTS |
| | | NFRLGFGSFVEKPVSPFVKTTPEEIANPCSSIPYFCLPTFGFKHILPLINDAERFN |
| | | EIVKNQKISRNIDAPEGGFDAIMQAAVCKEKIGWRNDSLHLLVFVSDADSHFGMDS |
| | | KLAGIVIPNDGLCHLDSKNEYSMSTVLEYPTIGQLIDKLVQNNVLLIFAVTQEQVH |
| | | LYENYAKLIPGATVGLLQKDSGNILQLIISAYEELRSEVELEVLGDTEGLNLSFTA |
| | | ICNNGTLFQHQKKCSHMKVGDTASFSVTVNIPHCERRSRHIIIKPVGLGDALELLV |
| | | SPECNCDCQKEVEVNSSKCHHGNGSFQCGVCACHPGHMGPRCECGEDMLSTDSCKE |
| | | APDHPSCSGRGDCYCGQCICHLSPYGNIYGPYCQCDNFSCVRHKGLLCGGNGDCDC |
| | | GECVCRSGWTGEYCNCTTSTDSCVSEDGVLCSGRGDCVCGKCVCTNPGASGPTCER |
| | | CPTCGDPCNSKRSCIECHLSAAGQAREECVDKCKLAGATISEEEDFSKDGSVSCSL |
| | | QGENECLITFLITTDNEGKTIIHSINEKDCPKPPNIPMIMLGVSLAILLIGVVLLC |
| | | IWKLLVSFHDRKEVAKFEAERSKAKWQTGTNPLYRGSTSTFKNVTYKHREKQKVDL |
| | | STDCGKPIPNPLLGLDST |
| 12 | Human ITB6 | AUGGGGAUCGAGCUGCUGUGCCUGUUCUUCCUGUUCCUGGGACGGAACGACCACGU |
| | nucleotide, | GCAGGGUGGCUGCGCCCUUGGUGGGGCAGAGACCUGCGAGGACUGCCUGCUCAUCG |
| | variant 4 | GCCCACAGUGCGCCUGGUGCGCUCAGGAGAACUUCACCCACCCCAGCGGAGUGGGC |
| | | GAGAGGUGCGACACCCCGGCCAACCUGCUGGCCAAGGGGUGCCAGCUGAACUUCAU |
| | | CGAGAACCCCGUCUCUCAGGUGGAGAUCCUGAAGAACAAGCCCCUCAGCGUUGGGC |
| | | GGCAGAAGAACAGCUCUGACAUCGUGCAGAUCGCGCCCCAGAGCCUGAUCCUGAAA |
| | | CUACGGCCUGGCGGUGCGCAAACCCUGCAGGUCCACGUGCGGCAGACCGAGGACUA |
| | | CCCUGUGGACCUGUACUACCUGAUGGACCUCUCCUACAGCAUGGACGACGAUCUGA |
| | | ACACCAUCAAGGAGCUGGGCAGCCGCCUGAGCAAGGAGAUGUCCAAGCUGACCUCC |
| | | AACUUCCGCCUGGGGUUCGGAUCCUUCGUGGAGAAGCCCGUGAGCCCCUUCGUGAA |
| | | GACCACCCCUGAGGAGAUCGCCAACCCCUGCAGCAGCAUCCCUUACUUCUGCCUGC |
| | | CCACCUUCGGCUUCAAGCACAUCCUGCCACUGACCAACGACGCCGAGCGGUUCAAC |
| | | GAGAUCGUGAAGAACCAGAAGAUCAGCAGAAACAUCGACGCCCCGGAGGGUGGGUU |
| | | CGACGCUAUCAUGCAGGCCGCCGUGUGCAAGGAGAAGAUCGGCUGGCGCAACGACA |
| | | GCCUGCACCUGCUGGUGUUCGUGUCCGACGCCGACUCCCACUUCGGCAUGGACAGC |
| | | AAGCUGGCCGGUAUCGUGAUCCCUAACGACGGCCUGUGCCACCUGGACAGCAAGAA |
| | | CGAGUACAGCAUGAGCACCGUGCUGGAGUACCCCACCAUCGGCCAGCUGAUCGACA |
| | | AGCUGGUGCAGAACAACGUGCUGCUGAUCUUCGCCGUGACCCAGGAGCAGGUGCAC |
| | | CUCUACGAGAACUACGCCAAGCUGAUUCCAGGCGCCACCGUCGGUCUGCUGCAGAA |
| | | GGACAGCGGCAACAUCCUGCAGCUGAUCAUCUCCGCCUACGAGGAGCUGAGGAGCG |
| | | AGGUGGAGCUGGAGGUGCUCGGGGACACCGAGGGCCUGAACCUGUCCUUCACCGCC |
| | | AUCUGCAACAACGGGACCCUCUUCCAGCACCAGAAGAAGUGCAGCCACAUGAAGGU |
| | | GGGCGACACCGCCAGCUUCAGCGUCACCGUGAACAUACCUCACUGUGAGCGGCGGA |
| | | GCAGGCACAUCAUCAUCAAGCCCGUGGGCCUGGGAGACGCCCUGGAGCUGCUGGUG |
| | | UCUCCCGAGUGCAACUGCGACUGCCAGAAGGAGGUGGAGGUGAACUCUAGCAAGUG |
| | | CCACCACGGCAACGGGAGUUUCCAGUGUGGCGUGUGUGCCUGCCACCCCGGUCACA |
| | | UGGGACCCCGGUGUGAGUGCGGGGAGGACAUGCUGAGCACCGACAGCUGCAAGGAG |
| | | GCCCCAGACCACCCGAGCUGUUCCGGUCGGGGCGACUGCUACUGCGGCCAGUGCAU |
| | | CUGUCACCUGAGCCCCUACGGCAACAUCUACGGGCCCUACUGCCAGUGCGACAACU |
| | | UCUCCUGCGUGCGCCACAAAGGCCUGCUGUGUGGCGGCAACGGCGACUGCGACUGC |
| | | GGGGAGUGCGUGUGCCGCAGUGGGUGGACCGGCGAGUACUGCAACUGCACCACCUC |
| | | CACCGACUCUUGCGUGUCCGAGGACGGGGUGCUGUGUUCCGGGCGCGGAGAUUGCG |
| | | UGUGCGGGAAGUGCGUGUGCACCAACCCUGGCGCAUCGGGUCCUACCUGCGAGAGG |
| | | UGCCCCACCUGUGGCGACCCCUGCAACAGCAAGCGCUCUUGCAUCGAGUGCCACCU |
| | | CUCAGCAGCAGGGCAGGCUCGGGAGGAGUGCGUGGACAAGUGCAAGCUCGCCGGCG |
| | | CCACCAUCAGUGAGGAGGAGGACUUCUCCAAGGACGGCAGCGUGUCCUGCUCCCUC |
| | | CAGGGCGAGAACGAGUGCCUCAUCACCUUCCUGAUCACCACCGACAACGAGGGCAA |
| | | GACCAUCAUCCACUCCAUCAACGAGAAGGACUGCCCCAAGCCGCCUAACAUCCCCA |
| | | UGAUCAUGCUGGGCGUGAGCCUGGCCAUCCUGCUGAUCGGCGUGGUGCUGCUGUGC |
| | | AUCUGGAAGCUGCUGGUCUCCUUCCACGACCGCAAGGAGGUGGCCAAGUUCGAGGC |
| | | CGAGCGCUCUAAGGCCAAGUGGCAGACCGGCACCAACCCUCUGUACCGGGGCUCCA |
| | | CCAGCACCUUCAAGAACGUGACCUACAAGCACCGCGAGAAGCAGAAGGUGGACCUG |
| | | UCCACCGACUGUGGCAAGCCCAUCCCCAAUCCCCUGCUGGGGCUGGACUCCACC |
| 17 | Human ITB6 | MGIELLCLFFLFLGRNDHVQGGCALGGAETCEDCLLIGPQCAWCAQENFTH |
| | amino acid, | PSGVGERCDTPANLLAKGCQLNFIENPVSQVEILKNKPLSVGRQKNSSDIV |
| | variant 5 | QIAPQSLILKLRPGGAQTLQVHVRQTEDYPVDLYYLMDLSASMDDDLNTIK |
| | | ELGSRLSKEMSKLTSNFRLGFGSFVEKPVSPFVKTTPEEIANPCSSIPYFC |
| | | LPTFGFKHILPLTNDAERFNEIVKNQKISANIDTPEGGFDAIMQAAVCKEK |
| | | IGWRNDSLHLLVFVSDADSHFGMDSKLAGIVIPNDGLCHLDSKNEYSMSTV |
| | | LEYPTIGQLIDKLVQNNVLLIFAVTQEQVHLYENYAKLIPGATVGLLQKDS |
| | | GNILQLIISAYEELRSEVELEVLGDTEGLNLSFTAICNNGTLFQHQKKCSH |
| | | MKVGDTASFSVTVNIPHCERRSRHIIIKPVGLGDALELLVSPECNCDCQKE |
| | | VEVNSSKCHHGNGSFQCGVCACHPGHMGPRCECGEDMLSTDSCKEAPDHPS |
| | | CSGRGDCYCGQCICHLSPYGNIYGPYCQCDNFSCVRHKGLLCGGNGDCDCG |
| | | ECVCRSGWTGEYCNCTTSTDSCVSEDGVLCSGRGDCVCGKCVCTNPGASGP |
| | | TCERCPTCGDPCNSKRSCIECHLSAAGQAREECVDKCKLAGATISEEEDFS |
| | | KDGSVSCSLQGENECLITFLITTDNEGKTIIHSINEKDCPKPPNIPMIMLG |
| | | VSLAILLIGVVLLCIWKLLVSFHDRKEVAKFEAERSKAKWQTGTNPLYRGS |
| | | TSTFKNVTYKHREKQKVDLSTDC |
| 18 | Human ITB6, | AUGGGUAUCGAGCUGCUGUGUCUGUUCUUUCUGUUUCUGGGCCGCAAC |
| | nucleotide, | GACCACGUCCAGGGCGGCUGCGCCCUGGGCGGGGCCGAGACCUGCGAG |
| | variant 5 (no | GACUGCCUGCUCAUCGGGCCACAGUGUGCCUGGUGUGCACAGGAGAAC |
| | stop codon) | UUCACCCACCCCAGCGGGGUGGGCGAGAGGUGCGACACCCCUGCAAAU |
| | | CUGCUGGCAAAGGGCUGCCAGCUGAAUUUCAUCGAGAAUCCCGUCAGC |
| | | CAGGUGGAGAUUCUCAAGAACAAGCCUCUGAGCGUCGGACGGCAGAAG |
| | | AACUCUUCUGACAUCGUCCAGAUCGCACCUCAGAGCCUGAUUCUGAAG |
| | | CUCCGCCCAGGCGGAGCUCAGACCCUCCAGGUCCACGUCAGGCAGACU |
| | | GAGGACUACCCCGUGGACCUGUACUACCUGAUGGAUCUGUCCGCCAGC |
| | | AUGGACGACGAUCUGAACACCAUUAAGGAGCUGGGCAGCCGGCUCUCU |
| | | AAGGAGAUGUCCAAGCUCACCAGCAACUUCAGGCUGGGAUUCGGCAGC |
| | | UUUGUCGAGAAGCCUGUGUCUCCUUUCGUGAAGACCACACCAGAGGAG |
| | | AUCGCAAACCCCUGUAGCAGCAUCCCCUACUUCUGCCUGCCUACAUUC |
| | | GGGUUCAAGCACAUUCUGCCUCUGACCAACGACGCAGAGCGCUUUAAC |
| | | GAGAUCGUGAAGAAUCAGAAGAUCAGCGCCAACAUUGAUACUCCUGA |
| | | GGGCGGCUUCGACGCCAUCAUGCAGGCUGCCGUCUGCAAGGAGAAGAU |
| | | CGGGUGGAGGAACGACAGCCUCCACCUGCUCGUGUUCGUGAGCGACGC |
| | | CGACAGCCACUUUGGGAUGGACUCCAAGCUGGCCGGCAUCGUGAUCCC |
| | | CAACGACGGGCUGUGUCACCUCGAUUCCAAGAACGAGUACAGCAUGAG |
| | | CACCGUGCUGGAGUACCCCACCAUUGGGCAGCUCAUUGAUAAGCUCGU |
| | | GCAGAACAACGUCCUGCUGAUCUUUGCAGUGACACAGGAGCAGGUGCA |
| | | CCUGUACGAGAAUUACGCAAAGCUCAUCCCCGGAGCCACUGUGGGCCU |
| | | CCUGCAGAAGGACUCCGGGAACAUCCUCCAGCUCAUCAUCUCCGCCUA |
| | | CGAGGAGCUGAGGAGCGAGGUGGAGCUCGAGGUCCUCGGGGACACCGA |
| | | GGGCCUCAACCUGAGCUUUACCGCCAUCUGCAACAACGGAACUCUCUU |
| | | CCAGCACCAGAAGAAGUGCUCUCACAUGAAGGUGGGCGACACCGCCUC |
| | | CUUCAGCGUGACCGUGAACAUCCCUCACUGUGAGCGGCGGAGCCGCCA |
| | | CAUCAUCAUCAAGCCCGUGGGGCUCGGGGACGCCCUGGAGCUCCUGGU |
| | | GUCCCCUGAGUGUAACUGCGACUGCCAGAAGGAGGUCGAGGUGAACAG |
| | | CUCUAAGUGCCACCACGGCAACGGGAGCUUCCAGUGCGGGGUGUGCGC |
| | | AUGCCACCCCGGCCACAUGGGGCCUCGCUGCGAGUGCGGCGAGGACAU |
| | | GCUGUCUACCGACAGCUGCAAGGAGGCCCCUGACCACCCUAGCUGCUC |
| | | UGGCCGCGGAGACUGCUACUGCGGCCAGUGCAUCUGCCACCUGUCCCC |
| | | UUACGGGAACAUUUACGGGCCCUACUGCCAGUGUGAUAACUUUUCCUG |
| | | CGUGCGGCACAAGGGCCUGCUGUGCGGAGGAAAUGGCGACUGCGACUG |
| | | CGGCGAGUGCGUCUGUCGCAGCGGCUGGACCGGGGAGUACUGCAACUG |
| | | CACUACUUCCACUGACAGCUGUGUCAGCGAGGACGGGGUGCUCUGUUC |
| | | UGGCCGCGGGGACUGCGUCUGCGGCAAGUGCGUGUGCACUAAUCCAGG |
| | | GGCCUCCGGGCCCACCUGCGAGCGGUGUCCCACCUGCGGGGACCCUUG |
| | | CAACAGCAAGAGGUCCUGCAUCGAGUGCCACCUGUCCGCCGCCGGACA |
| | | GGCACGCGAGGAGUGCGUCGAUAAGUGUAAGCUCGCCGGAGCUACAAU |
| | | UAGCGAGGAGGAGGACUUCUCCAAGGACGGGAGCGUGAGCUGCUCCCU |
| | | CCAGGGAGAGAACGAGUGCCUGAUCACUUUCCUCAUCACCACUGAUAA |
| | | CGAGGGAAAGACAAUCAUUCACUCUAUCAACGAGAAGGAUUGUCCCAA |
| | | GCCCCCAAACAUUCCCAUGAUCAUGCUGGGAGUGUCCCUGGCAAUCCU |
| | | GCUGAUCGGAGUCGUGCUGCUCUGCAUCUGGAAGCUGCUCGUCUCCUU |
| | | CCACGACCGCAAGGAGGUCGCAAAGUUUGAGGCCGAGCGGUCUAAGGC |
| | | CAAGUGGCAGACAGGGACCAAUCCUCUCUACCGCGGGUCUACUUCUAC |
| | | CUUCAAGAACGUGACUUACAAGCACAGGGAGAAGCAGAAGGUGGACC |
| | | UCUCCACCGAUUGC |
| 13 | Rat Variant 1 | MGIELVCLFLLLLGRNDHVQGGCAWSGAETCSDCLLTGPHCAWCSQENFTHLSGAG |
| | Amino Acid | ERCDTPENLLAKGCQLPFIENPVSQVEILQNKPLSVGRQKNSSDIVQIAPQSLVLK |
| | | LRPGGEQTLQVQVRQTEDYPVDLYYLMDLSASMDDDLNTIKELGSRLAKEMSKLTS |
| | | NFRLGFGSFVEKPVSPFMKTTPEEITNPCSSIPYFCLPTFGFKHILPLTDDAERFN |
| | | EIVRKQKISANIDTPEGGFDAIMQAAVCKEKIGWRNDSLHLLVFVSDADSHFGMDS |
| | | KLAGIVIPNDGLCHLDNRNEYSMSTVLEYPTIGQLIDKLVQNNVLLIFAVTQEQVH |
| | | LYENYAKLIPGATVGLLQKDSGNILQLIISAYEELRSEVELEVLGDTEGLNLSFTA |
| | | LCSNGILFPHQKKCSHMKVGDTASFNVSVSITNCEKRSRKLIIKPVGLGDTLEILV |
| | | SAECDCDCQREVEANSSKCHHGNGSFQCGVCACNPGHMGPRCECGEDMVSTDSCKE |
| | | SPGHPSCSGRGDCYCGQCVCHLSPYGSIYGPYCQCDNFSCLRHKGLLCGDNGDCDC |
| | | GECVCRDGWTGEYCNCTTSRDACASEDGVLCSGRGDCVCGKCVCRNPGASGPTCER |
| | | CPTCGDPCNSRRSCIECYLSADGQAQEECEDKCKATGATISEEEFSKDTSVPCSLQ |
| | | GENECLITFLITADNEGKTIIHNISEKDCPKPPNIPMIMLGVSLAILLIGVVLLCI |
| | | WKLLVSFHDRKEVAKFEAERSKAKWQTGTNPLYRGSTSTFKNVTYKHREKHKVGLS |
| | | SDGGKPIPNPLLGLDST |
| 14 | Rat Variant 1 | AUGGGCAUCGAGCUGGUGUGCCUGUUCCUGUUACUACUGGGCAGAAACGACCACGU |
| | Nucleotide | GCAGGGCGGCUGCGCCUGGAGCGGCGCCGAAACCUGCAGCGACUGCCUGCUGACCG |
| | | GCCCUCACUGCGCUUGGUGCAGCCAGGAGAACUUCACCCACCUCUCAGGCGCUGGC |
| | | GAGCGGUGCGACACCCCUGAGAACCUGCUGGCCAAGGGCUGCCAGCUGCCUUUCAU |
| | | CGAGAACCCUGUGAGCCAGGUGGAGAUCCUGCAGAACAAGCCUCUGAGCGUGGGCA |
| | | GACAGAAGAACAGCAGCGACAUCGUGCAGAUCGCCCCUCAGAGUCUCGUUCUGAAG |
| | | CUUCGGCCUGGCGGCGAGCAGACCCUGCAGGUGCAGGUGAGACAGACCGAGGACUA |
| | | CCCUGUGGACCUGUACUACCUGAUGGACUUAUCCGCCAGCAUGGACGACGACCUGA |
| | | ACACCAUCAAGGAGCUGGGCAGCAGACUUGCAAAGGAGAUGAGCAAGCUGACCAGC |
| | | AACUUCAGACUGGGCUUCGGCAGCUUCGUGGAGAAGCCAGUUAGUCCUUUCAUGAA |
| | | GACGACCCCAGAGGAGAUCACCAACCCUUGCAGCAGCAUCCCUUACUUCUGCCUGC |
| | | CUACCUUCGGCUUCAAGCACAUCCUGCCUCUGACCGACGACGCCGAGAGAUUCAAC |
| | | GAGAUCGUGAGAAAGCAGAAGAUCAGCGCCAACAUCGAUACACCUGAGGGAGGUUU |
| | | CGACGCCAUCAUGCAGGCCGCCGUGUGCAAGGAGAAGAUCGGCUGGCGAAACGACA |
| | | GCCUGCACCUUCUAGUGUUCGUGAGCGACGCAGACAGCCACUUCGGCAUGGACUCU |
| | | AAGCUAGCCGGCAUCGUGAUCCCUAACGACGGCCUGUGCCACCUGGACAAUCGUAA |
| | | CGAGUACAGCAUGAGCACCGUGCUGGAGUACCCUACCAUCGGCCAGCUGAUCGACA |
| | | AGCUUGUGCAGAAUAACGUGCUGCUGAUCUUCGCCGUGACCCAGGAGCAGGUCCAC |
| | | CUGUACGAGAACUACGCCAAGCUGAUCCCUGGCGCCACCGUGGGCCUGCUGCAGAA |
| | | GGACAGCGGCAACAUCUUACAGCUGAUUAUAUCAGCCUACGAGGAGCUGAGAAGCG |
| | | AGGUGGAGCUGGAGGUGCUGGGCGACACCGAGGGCCUGAACCUGAGCUUCACCGCC |
| | | CUGUGCAGCAACGGCAUCCUGUUCCCUCACCAGAAGAAGUGUUCCCACAUGAAGGU |
| | | CGGUGAUACAGCAUCAUUCAACGUGAGCGUGAGCAUUACCAAUUGCGAGAAGAGAA |
| | | GCAGAAAGUUAAUAAUUAAGCCUGUCGGACUGGGCGAUACUCUUGAAAUCCUAGUG |
| | | AGCGCCGAGUGCGACUGUGAUUGCCAGAGAGAGGUGGAAGCCAAUUCUUCCAAGUG |
| | | CCACCACGGCAACGGAUCCUUCCAGUGCGGCGUGUGCGCCUGCAACCCUGGCCACA |
| | | UGGGCCCUCGAUGCGAGUGUGGAGAGGACAUGGUUUCUACCGACAGCUGCAAGGAA |
| | | AGCCCAGGCCAUCCUAGCUGCAGCGGCAGAGGCGACUGCUACUGCGGCCAGUGCGU |
| | | GUGCCAUCUGAGUCCUUACGGCAGCAUCUACGGCCCUUACUGUCAGUGCGAUAACU |
| | | UCUCGUGCCUGAGACACAAGGGUUUGCUGUGCGGUGACAACGGAGAUUGUGACUGC |
| | | GGAGAGUGCGUGUGUAGAGACGGCUGGACCGGCGAGUACUGCAACUGCACCACCAG |
| | | CAGGGACGCCUGCGCCAGCGAGGACGGCGUGUUGUGUUCUGGACGUGGUGAUUGUG |
| | | UGUGUGGCAAGUGCGUCUGCAGAAACCCGGGAGCCAGCGGCCCUACCUGUGAGAGG |
| | | UGCCCAACUUGUGGCGAUCCUUGCAAUUCACGUAGGAGCUGCAUCGAGUGCUACUU |
| | | GAGCGCUGACGGCCAGGCCCAGGAGGAGUGCGAGGAUAAGUGCAAGGCCACCGGAG |
| | | CAACUAUCUCUGAGGAAGAAUUCAGCAAGGACACCAGCGUGCCUUGCAGUUUGCAG |
| | | GGAGAGAACGAGUGCCUGAUCACCUUCCUCAUCACCGCCGACAACGAGGGCAAGAC |
| | | CAUCAUCCACAAUAUUAGCGAGAAGGACUGCCCUAAGCCUCCUAACAUCCCUAUGA |
| | | UCAUGCUGGGAGUGAGCUUGGCUAUCCUGCUUAUCGGCGUGGUCUUGCUGUGUAUC |
| | | UGGAAGCUCCUCGUCAGUUUCCACGACAGAAAGGAGGUGGCCAAGUUCGAGGCUGA |
| | | AAGAUCUAAGGCCAAGUGGCAGACCGGAACCAAUCCUCUGUACAGAGGCAGCACCA |
| | | GCACCUUCAAGAACGUGACCUACAAGCACCGGGAGAAGCACAAGGUCGGCCUGAGU |
| | | AGCGACGGCGGCAAGCCUAUUCCAAACCCACUGCUCGGUCUGGACUCAACC |
| 15 | Mouse ITB6 | MGIELVCLFLLLLGRNDHVQGGCAWGGAESCSDCLLTGPHCAWCSQENFTHLS |
| | amino acid | GAGERCDTPANLLAKGCQLPFIENPVSRIEVLQNKPLSVGRQKNSSDIVQIAPQSL |
| | | VLKLRPGREQTLQVQVRQTEDYPVDLYYLMDLSASMDDDLNTIKELGSRLAKEMSK |
| | | LTSNFRLGFGSFVEKPVSPFMKTTPEEITNPCSSIPYFCLPTFGFKHILPLTDDAE |
| | | RFNEIVRKQKISANIDTPEGGFDAIMQAAVCKEKIGWRNDSLHLLVFVSDADSHFG |
| | | MDSKLAGIVIPNDGLCHLDHRNEYSMSTVLEYPTIGQLIDKLVQNNVLLIFAVTQE |
| | | QVHLYENYAKLIPGATVGLLQKDSGNILQLIISAYEELRSEVELEVLGDTEGLNLS |
| | | FTALCNNGVLFPHQKKCSHMKVGDTASFNVTVSVSNCEKRSRNLIIKPVGLGDTLE |
| | | ILVSAECDCDCQREIETNSSKCHNGNGSFQCGVCTCNPGHMGPHCECGEDMVSTDS |
| | | CKESPGHPSCSGRGDCYCGQCICHLSPYGSIYGPYCQCDNFSCLRHKGLLCGDNGD |
| | | CDCGECVCRDGWTGEYCNCTTNRDSCTSEDGVLCSGRGDCVCGKCVCRNPGASGPT |
| | | CERCPTCGDPCNSKRSCIECYLSADGQAQEECADKCKAIGATISEEDFSKDTSVSC |
| | | SLQGENECLITFLITTDNEGKTIIHNINEKDCPKPPNIPMIMLGVSLAILLIGVVL |
| | | LCIWKLLVSFHDRKEVAKFEAERSKAKWQTGTNPLYRGSTSTFKNVTYKHREKHKA |
| | | GLSSDGGKPIPNPLLGLDST |
| 16 | Mouse ITB6 | AUGGGCAUCGAGCUGGUGUGCCUGUUCCUGCUACUCUUAGGCAGAAACGACCA |
| | nucleotide | CGUGCAAGGCGGCUGCGCCUGGGGAGGUGCCGAGAGCUGCAGCGACUGCCUGCUGA |
| | | CCGGCCCUCACUGUGCGUGGUGCAGCCAGGAGAACUUCACCCACCUGAGUGGCGCC |
| | | GGCGAGCGAUGCGACACCCCUGCCAACCUGCUGGCCAAGGGCUGCCAGCUGCCUUU |
| | | CAUCGAGAACCCUGUGAGCAGAAUCGAGGUGCUGCAGAACAAGCCUCUGAGCGUGG |
| | | GCAGACAGAAGAACAGCAGCGACAUCGUGCAGAUCGCCCCUCAGUCACUUGUACUG |
| | | AAGUUGCGGCCUGGCAGAGAGCAGACCCUGCAGGUGCAGGUGAGACAGACCGAGGA |
| | | CUACCCUGUGGACCUGUACUACCUGAUGGAUCUGAGCGCCAGCAUGGACGACGACC |
| | | UGAACACCAUCAAGGAACUGGGUAGCAGACUGGCUAAGGAGAUGAGCAAGCUGACC |
| | | AGCAACUUCAGACUGGGCUUCGGCAGCUUCGUGGAGAAGCCUGUUUCACCUUUCAU |
| | | GAAGACCACCCCUGAGGAGAUCACCAACCCUUGCAGCAGCAUCCCUUACUUCUGCC |
| | | UGCCUACCUUCGGCUUCAAGCACAUCCUGCCUCUGACCGACGACGCGGAGAGAUUC |
| | | AACGAGAUCGUGAGAAAGCAGAAGAUCAGCGCCAACAUUGACACCCCGGAAGGCGG |
| | | AUUCGACGCCAUCAUGCAGGCCGCCGUGUGCAAGGAGAAGAUCGGCUGGAGAAACG |
| | | AUAGCCUGCAUUUGUUAGUGUUCGUGAGUGACGCAGACAGCCACUUCGGCAUGGAC |
| | | UCCAAGCUUGCCGGCAUCGUGAUCCCUAACGACGGCCUGUGCCACCUGGACCACAG |
| | | GAACGAGUACAGCAUGAGCACCGUGCUGGAGUACCCUACCAUCGGCCAGCUGAUCG |
| | | ACAAGCUGGUCCAGAAUAACGUGCUGCUGAUCUUCGCCGUGACCCAGGAACAGGUU |
| | | CACCUGUACGAGAACUACGCCAAGCUGAUCCCUGGCGCCACCGUGGGCCUCCUGCA |
| | | GAAGGACAGCGGCAACAUCCUCCAACUGAUCAUAUCUGCUUACGAGGAGCUGAGAA |
| | | GCGAGGUGGAGCUGGAGGUGCUCGGCGACACCGAGGGCCUGAACCUGAGCUUCACC |
| | | GCCCUGUGCAACAACGGCGUGCUGUUCCCUCACCAGAAGAAGUGUAGUCACAUGAA |
| | | GGUUGGCGAUACCGCCAGCUUCAACGUGACCGUGAGCGUGAGCAACUGCGAGAAGA |
| | | GAAGCAGAAACCUUAUAAUAAAGCCAGUUGGUCUGGGCGACACACUGGAGAUCCUG |
| | | GUGAGCGCCGAGUGCGACUGCGAUUGUCAGAGAGAGAUCGAGACAAAUUCGUCUAA |
| | | GUGCCACAACGGCAACGGAUCUUUCCAGUGCGGCGUGUGCACCUGCAACCCUGGCC |
| | | ACAUGGGACCACACUGCGAGUGCGGAGAGGACAUGGUGUCAACCGACAGCUGUAAG |
| | | GAGAGCCCAGGCCAUCCUUCUUGCUCCGGCAGAGGCGACUGCUACUGCGGCCAGUG |
| | | CAUCUGCCAUCUCUCCCCUUACGGCAGCAUCUACGGCCCUUACUGCCAGUGCGAUA |
| | | ACUUCUCGUGCCUGAGACACAAGGGCCUGCUCUGCGGCGACAACGGCGACUGUGAU |
| | | UGUGGUGAGUGUGUGUGCAGAGACGGCUGGACCGGCGAGUACUGCAACUGCACCAC |
| | | CAACAGAGAUAGCUGUACCAGCGAGGACGGUGUCCUCUGUUCCGGACGGGGUGAUU |
| | | GCGUUUGUGGCAAGUGUGUUUGCCGUAACCCAGGAGCCAGCGGCCCUACCUGCGAA |
| | | AGGUGCCCGACCUGUGGAGAUCCGUGUAACAGCAAGCGAAGUUGCAUCGAGUGCUA |
| | | UCUCUCCGCAGACGGCCAGGCCCAGGAGGAGUGCGCCGACAAGUGCAAGGCCAUCG |
| | | GCGCUACUAUUUCGGAAGAGGACUUCAGCAAGGACACCAGCGUUAGCUGUUCGCUG |
| | | CAGGGUGAGAACGAGUGCCUGAUCACCUUCCUCAUCACGACCGACAACGAGGGCAA |
| | | GACCAUCAUCCACAACAUCAACGAGAAGGACUGCCCUAAGCCUCCUAACAUCCCUA |
| | | UGAUCAUGCUGGGAGUGAGCCUGGCCAUACUGCUUAUCGGCGUGGUUCUGCUGUGC |
| | | AUUUGGAAGUUAUUAGUGAGUUUCCACGACAGAAAGGAGGUGGCCAAGUUCGAGGC |
| | | CGAGAGGUCCAAGGCCAAGUGGCAGACCGGCACGAACCCACUGUACAGAGGCAGCA |
| | | CCAGCACCUUCAAGAACGUCACAUACAAGCACCGGGAGAAGCACAAGGCCGGCCUG |
| | | UCAUCUGACGGCGGCAAGCCUAUCCCGAAUCCACUCCUAGGACUGGAUAGUACC |

Signal sequence underlined;
tag sequence italicized and underlined

[0627] In some embodiments, a polynucleotide of the present disclosure, for example a polynucleotide comprising an mRNA nucleotide sequence encoding an ITB6 polypeptide, comprises (1) a 5′ cap, e.g., as disclosed herein, e.g., as provided in Table 2A, (2) a 5′ UTR, e.g., as provided in Table 2A, (3) a nucleotide sequence ORF provided in Table 2A, (4) a stop codon, (5) a 3′UTR, e.g., as provided in Table 2A, and (6) a tail (e.g., poly-A tail), e.g., as disclosed herein, e.g., a poly-A tail of about 100 residues (e.g., SEQ ID NO:502).

[0628] In some embodiments, the polynucleotide comprises an mRNA nucleotide sequence encoding an ITB6 polypeptide.

[0629] In some embodiments, the polynucleotide (e.g., mRNA) encoding the ITB6 molecule comprises the nucleotide sequence of SEQ ID NO: 175, which comprises from 5′ to 3′ end: the 5′ UTR sequence of SEQ ID NO: 50, the ORF sequence of SEQ ID NO: 18, and the 3′ UTR sequence of SEQ ID NO: 142.

[0630] In some embodiments, the polynucleotide (e.g., mRNA) encoding the ITB6 molecule comprises the nucleotide sequence of SEQ ID NO: 160, which comprises from 5′ to 3′ end: the 5′ UTR sequence of SEQ ID NO: 56, the ORF sequence of SEQ ID NO: 2, and the 3′ UTR sequence of SEQ ID NO: 110.

[0631] In some embodiments, the polynucleotide (e.g., mRNA) encoding the ITB6 molecule comprises the nucleotide sequence of SEQ ID NO: 161, which comprises from 5′ to 3′ end: the 5′ UTR sequence of SEQ ID NO: 50, the ORF sequence of SEQ ID NO: 3, and the 3′ UTR sequence of SEQ ID NO: 110.

[0632] In some embodiments, the polynucleotide (e.g., mRNA) encoding the ITB6 molecule comprises the nucleotide sequence of SEQ ID NO: 162, which comprises from 5′ to 3′ end: the 5′ UTR sequence of SEQ ID NO: 50, ORF sequence of SEQ ID NO: 4, and the 3′ UTR sequence of SEQ ID NO: 143.

[0633] In some embodiments, the polynucleotide (e.g., mRNA) encoding the ITB6 molecule comprises the nucleotide sequence of SEQ ID NO: 163, which comprises from 5′ to 3′ end: the 5′ UTR sequence of SEQ ID NO: 50, the ORF sequence of SEQ ID NO: 5, and the 3′ UTR sequence of SEQ ID NO: 110.

[0634] In some embodiments, the polynucleotide (e.g., mRNA) encoding the ITB6 molecule comprises the nucleotide sequence of SEQ ID NO: 164, which comprises from 5′ to 3′ end: the 5′ UTR sequence of SEQ ID NO: 50, the ORF sequence of SEQ ID NO: 5, and the 3′ UTR sequence of SEQ ID NO: 144.

[0635] In some embodiments, the polynucleotide (e.g., mRNA) encoding the ITB6 molecule comprises the nucleotide sequence of SEQ ID NO: 169, which comprises from 5′ to 3′ end: the 5′ UTR sequence of SEQ ID NO: 50, the ORF sequence of SEQ ID NO: 5, and the 3′ UTR sequence of SEQ ID NO: 145.

[0636] In some embodiments, the polynucleotide (e.g., mRNA) encoding the ITB6 molecule comprises the nucleotide sequence of SEQ ID NO: 165, which comprises from 5′ to 3′ end: the 5′ UTR sequence of SEQ ID NO: 50, the ORF sequence of SEQ ID NO: 6, and the 3′ UTR sequence of SEQ ID NO: 110.

[0637] In some embodiments, the polynucleotide (e.g., mRNA) encoding the ITB6 molecule comprises the nucleotide sequence of SEQ ID NO: 166, which comprises from 5′ to 3′ end: the 5′ UTR sequence of SEQ ID NO: 50, the ORF sequence of SEQ ID NO: 6, and the 3′ UTR sequence of SEQ ID NO: 110.

[0638] In some embodiments, the polynucleotide (e.g., mRNA) encoding the ITB6 molecule comprises the nucleotide sequence of SEQ ID NO: 167, which comprises from 5′ to 3′ end: the 5′ UTR sequence of SEQ ID NO: 50, the ORF sequence of SEQ ID NO: 6, and the 3′ UTR sequence of SEQ ID NO: 145.

[0639] In some embodiments, the polynucleotide (e.g., mRNA) encoding the ITB6 molecule comprises the nucleotide sequence of SEQ ID NO: 168, which comprises from 5′ to 3′ end: the 5′ UTR sequence of SEQ ID NO: 50, the ORF sequence of SEQ ID NO: 6, and the 3′ UTR sequence of SEQ ID NO: 143.

[0640] In some embodiments, the polynucleotide (e.g., mRNA) encoding the ITB6 molecule comprises the nucleotide sequence of SEQ ID NO: 170, which comprises from 5′ to 3′ end: the 5′ UTR sequence of SEQ ID NO: 50, the ORF sequence of SEQ ID NO: 8, and the 3′ UTR sequence of SEQ ID NO: 110.

[0641] In some embodiments, the polynucleotide (e.g., mRNA) encoding the ITB6 molecule comprises the nucleotide sequence of SEQ ID NO: 171, which comprises from 5′ to 3′ end: the 5′ UTR sequence of SEQ ID NO: 50, the ORF sequence of SEQ ID NO: 10, and the 3′ UTR sequence of SEQ ID NO: 110.

[0642] In some embodiments, the polynucleotide (e.g., mRNA) encoding the ITB6 molecule comprises the nucleotide sequence of SEQ ID NO: 172, which comprises from 5′ to 3′ end: the 5′ UTR sequence of SEQ ID NO: 50, the ORF sequence of SEQ ID NO: 12, and the 3′ UTR sequence of SEQ ID NO: 110.

[0643] In some embodiments, the polynucleotide (e.g., mRNA) encoding the ITB6 molecule comprises the nucleotide sequence of SEQ ID NO: 173, which comprises from 5′ to 3′ end: the 5′ UTR sequence of SEQ ID NO: 50, the ORF sequence of SEQ ID NO: 14, and the 3′ UTR sequence of SEQ ID NO: 110.

[0644] In some embodiments, the polynucleotide (e.g., mRNA) encoding the ITB6 molecule comprises the nucleotide sequence of SEQ ID NO: 174, which comprises from 5′ to 3′ end: the 5′ UTR sequence of SEQ ID NO: 56, the ORF sequence of SEQ ID NO: 16, and the 3′ UTR sequence of SEQ ID NO: 110.

[0645] In some embodiments, all of the 5′ UTR, ORF, and/or 3′ UTR sequences include the modification(s) described in Table 2A. In some embodiments, one, two, or all of the 5′ UTR, ORF, and/or 3′ UTR sequences do not include the modification(s) described in Table 2A. In some embodiments, the 5′ UTRs described in Table 2A additionally comprise a first nucleotide that is an “A” or a “G.”

TABLE 2A
Exemplary ITB6 construct sequences

| | | ORF | | | | |
|---|---|---|---|---|---|---|
| | mRNA | Sequence | | | | |
| | Descrip- | (Amino | ORF Sequence | 5′ UTR | 3′ UTR | Construct |
| | tion | Acid) | (Nucleotide) | Sequence | Sequence | Sequence |
| SEQ ID | | | | | | |
| NO | | 17 | 18 | 50 | 142 | 175 |
| Human | ITB6 | MGIELLCLF | AUGGGUAUCGAGCUGCUGUGUCUGUUCUUUCUGUUUCUG | GGAAAUCG | UAAGCCCC | SEQ ID |
| Var- | G5 | FLFLGRNDH | GGCCGCAACGACCACGUCCAGGGCGGCUGCGCCCUGGGC | CAAAAUUU | UCCGGGGC | NO: 175 |
| iant | Cap: | VQGGCALGG | GGGGCCGAGACCUGCGAGGACUGCCUGCUCAUCGGGCCA | GCUCUUCG | AAACACCA | consists |
| 5.1 | m⁷GpppG_{2′O} | AETCEDCLL | CAGUGUGCCUGGUGUGCACAGGAGAACUUCACCCACCCC | CGUUAGAU | UUGUCACA | from 5′ |
| | MepA | IGPQCAWCA | AGCGGGGUGGGCGAGAGGUGCGACACCCCUGCAAAUCUG | UUCUUUUA | CUCCAGCC | to 3′ |
| | Poly A | QENFTHPSG | CUGGCAAAGGGCUGCCAGCUGAAUUUCAUCGAGAAUCCC | GUUUUCUC | UCGGUGGC | end: 5′ |
| | tail: | VGERCDTPA | GUCAGCCAGGUGGAGAUUCUCAAGAACAAGCCUCUGAGC | GCAACUAG | CUAGCUUC | UTR of |
| | 100 nt | NLLAKGCQL | GUCGGACGGCAGAAGAACUCUUCUGACAUCGUCCAGAUC | CAAGCUUU | UUGCCCCU | SEQ ID |
| | (SEQ ID | NFIENPVSQ | GCACCUCAGAGCCUGAUUCUGAAGCUCCGCCCAGGCGGA | UUGUUCUC | UGGGCCCA | NO: 50, |
| | NO: | VEILKNKPL | GCUCAGACCCUCCAGGUCCACGUCAGGCAGACUGAGGAC | GCC | AACACCAU | ORF |
| | 502) | SVGRQKNSS | UACCCCGUGGACCUGUACUACCUGAUGGAUCUGUCCGCC | | UGUCACAC | sequence |
| | | DIVQIAPQS | AGCAUGGACGACGAUCUGAACACCAUUAAGGAGCUGGGC | | UCCAUCCC | of SEQ |
| | | LILKLRPGG | AGCCGGCUCUCUAAGGAGAUGUCCAAGCUCACCAGCAAC | | CCCAGCCC | ID NO: |
| | | AQTLQVHVR | UUCAGGCUGGGAUUCGGCAGCUUUGUCGAGAAGCCUGUG | | CUCCUCCC | 18, and |
| | | QTEDYPVDL | UCUCCUUUCGUGAAGACCACACCAGAGGAGAUCGCAAAC | | CUUCCUGC | 3′ UTR |
| | | YYLMDLSAS | CCCUGUAGCAGCAUCCCCUACUUCUGCCUGCCUACAUUC | | ACCCGUAC | sequence |
| | | MDDDLNTIK | GGGUUCAAGCACAUUCUGCCUCUGACCAACGACGCAGAG | | CCCCCAAA | of SEQ |
| | | ELGSRLSKE | CGCUUUAACGAGAUCGUGAAGAAUCAGAAGAUCAGCGCC | | CACCAUUG | ID NO: |
| | | MSKLTSNFR | AACAUUGAUACUCCUGAGGGCGGCUUCGACGCCAUCAUG | | UCACACUC | 142. |
| | | LGFGSFVEK | CAGGCUGCCGUCUGCAAGGAGAAGAUCGGGUGGAGGAAC | | CAGUGGUC | |
| | | PVSPFVKTT | GACAGCCUCCACCUGCUCGUGUUCGUGAGCGACGCCGAC | | UUUGAAUA | |
| | | PEEIANPCS | AGCCACUUUGGGAUGGACUCCAAGCUGGCCGGCAUCGUG | | AAGUCUGA | |
| | | SIPYFCLPT | AUCCCCAACGACGGGCUGUGUCACCUCGAUUCCAAGAAC | | GUGGGCGG | |
| | | FGFKHILPL | GAGUACAGCAUGAGCACCGUGCUGGAGUACCCCACCAUU | | C | |
| | | TNDAERFNE | GGGCAGCUCAUUGAUAAGCUCGUGCAGAACAACGUCCUG | | | |
| | | IVKNQKISA | CUGAUCUUUGCAGUGACACAGGAGCAGGUGCACCUGUAC | | | |
| | | NIDTPEGGF | GAGAAUUACGCAAAGCUCAUCCCCGGAGCCACUGUGGGC | | | |
| | | DAIMQAAVC | CUCCUGCAGAAGGACUCCGGGAACAUCCUCCAGCUCAUC | | | |
| | | KEKIGWRND | AUCUCCGCCUACGAGGAGCUGAGGAGCGAGGUGGAGCUC | | | |
| | | SLHLLVFVS | GAGGUCCUCGGGGACACCGAGGGCCUCAACCUGAGCUUU | | | |
| | | DADSHFGMD | ACCGCCAUCUGCAACAACGGAACUCUCUUCCAGCACCAG | | | |
| | | SKLAGIVIP | AAGAAGUGCUCUCACAUGAAGGUGGGCGACACCGCCUCC | | | |
| | | NDGLCHLDS | UUCAGCGUGACCGUGAACAUCCCUCACUGUGAGCGGCGG | | | |
| | | KNEYSMSTV | AGCCGCCACAUCAUCAUCAAGCCCGUGGGGCUCGGGGAC | | | |
| | | LEYPTIGQL | GCCCUGGAGCUCCUGGUGUCCCCUGAGUGUAACUGCGAC | | | |
| | | IDKLVQNNV | UGCCAGAAGGAGGUCGAGGUGAACAGCUCUAAGUGCCAC | | | |
| | | LLIFAVTQE | CACGGCAACGGGAGCUUCCAGUGCGGGGUGUGCGCAUGC | | | |
| | | QVHLYENYA | CACCCCGGCCACAUGGGGCCUCGCUGCGAGUGCGGCGAG | | | |
| | | KLIPGATVG | GACAUGCUGUCUACCGACAGCUGCAAGGAGGCCCCUGAC | | | |
| | | LLQKDSGNI | CACCCUAGCUGCUCUGGCCGCGGAGACUGCUACUGCGGC | | | |
| | | LQLIISAYE | CAGUGCAUCUGCCACCUGUCCCCUUACGGGAACAUUUAC | | | |
| | | ELRSEVELE | GGGCCCUACUGCCAGUGUGAUAACUUUUCCUGCGUGCGG | | | |
| | | VLGDTEGLN | CACAAGGGCCUGCUGUGCGGAGGAAAUGGCGACUGCGAC | | | |
| | | LSFTAICNN | UGCGGCGAGUGCGUCUGUCGCAGCGGCUGGACCGGGGAG | | | |
| | | GTLFQHQKK | UACUGCAACUGCACUACUUCCACUGACAGCUGUGUCAGC | | | |
| | | CSHMKVGDT | GAGGACGGGGUGCUCUGUUCUGGCCGCGGGGACUGCGUC | | | |
| | | ASFSVTVNI | UGCGGCAAGUGCGUGUGCACUAAUCCAGGGGCCUCCGGG | | | |
| | | PHCERRSRH | CCCACCUGCGAGCGGUGUCCCACCUGCGGGGACCCUUGC | | | |
| | | IIIKPVGLG | AACAGCAAGAGGUCCUGCAUCGAGUGCCACCUGUCCGCC | | | |
| | | DALELLVSP | GCCGGACAGGCACGCGAGGAGUGCGUCGAUAAGUGUAAG | | | |
| | | ECNCDCQKE | CUCGCCGGAGCUACAAUUAGCGAGGAGGAGGACUUCUCC | | | |
| | | VEVNSSKCH | AAGGACGGGAGCGUGAGCUGCUCCCUCCAGGGAGAGAAC | | | |
| | | HGNGSFQCG | GAGUGCCUGAUCACUUUCCUCAUCACCACUGAUAACGAG | | | |
| | | VCACHPGHM | GGAAAGACAAUCAUUCACUCUAUCAACGAGAAGGAUUGU | | | |
| | | GPRCECGED | CCCAAGCCCCCAAACAUUCCCAUGAUCAUGCUGGGAGUG | | | |
| | | MLSTDSCKE | UCCCUGGCAAUCCUGCUGAUCGGAGUCGUGCUGCUCUGC | | | |
| | | APDHPSCSG | AUCUGGAAGCUGCUCGUCUCCUUCCACGACCGCAAGGAG | | | |
| | | RGDCYCGQC | GUCGCAAAGUUUGAGGCCGAGCGGUCUAAGGCCAAGUGG | | | |
| | | ICHLSPYGN | CAGACAGGGACCAAUCCUCUCUACCGCGGGUCUACUUCU | | | |
| | | IYGPYCQCD | ACCUUCAAGAACGUGACUUACAAGCACAGGGAGAAGCAG | | | |
| | | NFSCVRHKG | AAGGUGGACCUCUCCACCGAUUGC | | | |
| | | LLCGGNGDC | | | | |
| | | DCGECVCRS | | | | |
| | | GWTGEYCNC | | | | |
| | | TTSTDSCVS | | | | |
| | | EDGVLCSGR | | | | |
| | | GDCVCGKCV | | | | |
| | | CTNPGASGP | | | | |
| | | TCERCPTCG | | | | |
| | | DPCNSKRSC | | | | |
| | | IECHLSAAG | | | | |
| | | QAREECVDK | | | | |
| | | CKLAGATIS | | | | |
| | | EEEDFSKDG | | | | |
| | | SVSCSLQGE | | | | |
| | | NECLITFLI | | | | |
| | | TTDNEGKTI | | | | |
| | | IHSINEKDC | | | | |
| | | PKPPNIPMI | | | | |
| | | MLGVSLAIL | | | | |
| | | LIGVVLLCI | | | | |
| | | WKLLVSFHD | | | | |
| | | RKEVAKFEA | | | | |
| | | ERSKAKWQT | | | | |
| | | GTNPLYRGS | | | | |
| | | TSTFKNVTY | | | | |
| | | KHREKQKVD | | | | |
| | | LSTDC | | | | |
| SEQ ID | | | | | | |
| NO: | | 1 | 2 | 56 | 110 | 160 |
| Human | ITB6 | MGIELLCLF | AUGGGCAUCGAGCUGCUGUGCCUGUUCUUCCUGUUCCUG | GGAAAUAA | UGAUAAUA | SEQ ID |
| Var- | G5 | FLFLGRNDH | GGCAGAAACGACCACGUGCAGGGAGGUUGCGCCCUCGGA | GAGAGAAA | GGCUGGAG | NO: 160 |
| iant | Cap C1 | VQGGCALGG | GGUGCCGAGACAUGCGAGGACUGCCUGCUGAUCGGCCCU | AGAAGAGU | CCUCGGUG | consists |
| 1.1 | Poly A | AETCEDCLL | CAGUGCGCCUGGUGCGCCCAGGAGAACUUCACCCACCCU | AAGAAGAA | GCCUAGCU | from 5′ |
| | tail: | IGPQCAWCA | AGCGGCGUGGGCGAGAGGUGCGACACCCCUGCCAACCUG | AUAUAAGA | UCUUGCCC | to 3′ |
| | 100 nt | QENFTHPSG | CUGGCCAAGGGCUGCCAGCUGAACUUCAUCGAGAACCCU | CCCCGGCG | CUUGGGCC | end: 5′ |
| | (SEQ ID | VGERCDTPA | GUGAGCCAGGUGGAGAUCCUGAAGAACAAGCCUCUGAGC | CCGCCACC | UCCCCCCA | UTR of |
| | NO: 502) | NLLAKGCQL | GUGGGCAGACAGAAGAACAGCAGCGACAUCGUGCAGAUC | | GCCCCUCC | SEQ ID |
| | | NFIENPVSQ | GCCCCUCAGAGCCUGAUUUUGAAGCUCCGGCCUGGAGGA | | UCCCCUUC | NO: 56, |
| | | VEILKNKPL | GCACAGACCCUGCAGGUGCACGUGAGACAGACCGAGGAC | | CUGCACCC | ORF |
| | | SVGRQKNSS | UACCCUGUGGACCUGUACUACCUGAUGGACCUGAGCGCC | | GUACCCCC | sequence |
| | | DIVQIAPQS | AGCAUGGACGACGACCUGAACACCAUCAAGGAGCUGGGC | | CAAACACC | of SEQ |
| | | LILKLRPGG | AGCAGACUGAGCAAGGAGAUGAGCAAGCUGACCAGCAAC | | AUUGUCAC | ID NO: |
| | | AQTLQVHVR | UUCAGACUGGGCUUCGGCAGCUUCGUGGAGAAGCCUGUA | | ACUCCAGU | 2, and |
| | | QTEDYPVDL | UCGCCUUUCGUGAAGACCACCCCUGAGGAGAUCGCCAAC | | GGUCUUUG | 3′ UTR |
| | | YYLMDLSAS | CCUUGCAGCAGCAUCCCUUACUUCUGCCUGCCUACCUUC | | AAUAAAGU | sequence |
| | | MDDDLNTIK | GGCUUCAAGCACAUCCUGCCUCUGACCAACGACGCCGAG | | CUGAGUGG | of SEQ |
| | | ELGSRLSKE | AGAUUCAACGAGAUAGUUAAGAACCAGAAGAUCAGCGCC | | GCGGC | ID NO: |
| | | MSKLTSNFR | AACAUAGAUACUCCAGAAGGAGGUUUCGACGCCAUCAUG | | | 110. |
| | | LGFGSFVEK | CAGGCCGCCGUGUGUAAGGAGAAGAUCGGCUGGCGGAAC | | | |
| | | PVSPFVKTT | GACAGCCUGCAUCUUUUGGUGUUCGUGAGUGACGCAGAC | | | |
| | | PEEIANPCS | AGCCACUUCGGCAUGGACUCUAAGUUAGCCGGCAUCGUG | | | |
| | | SIPYFCLPT | AUCCCUAACGACGGCCUGUGCCACCUGGACAGCAAGAAC | | | |
| | | FGFKHILPL | GAGUACAGCAUGAGCACCGUGCUGGAGUACCCUACCAUC | | | |
| | | TNDAERFNE | GGUCAGCUGAUCGACAAGCUGGUGCAGAACAACGUGCUG | | | |
| | | IVKNQKISA | CUAAUCUUCGCCGUGACCCAGGAACAAGUCCACCUGUAC | | | |
| | | NIDTPEGGF | GAGAACUACGCCAAGCUGAUCCCUGGCGCCACCGUGGGC | | | |
| | | DAIMQAAVC | CUGCUGCAGAAGGACAGCGGCAAUAUCUUGCAGUUGAUU | | | |
| | | KEKIGWRND | AUUUCCGCAUACGAGGAGCUGAGAAGCGAGGUGGAGCUG | | | |
| | | SLHLLVFVS | GAGGUGCUGGGCGACACCGAGGGCCUGAACCUGAGCUUC | | | |
| | | DADSHFGMD | ACCGCCAUCUGCAACAACGGCACCCUGUUCCAGCAUCAG | | | |
| | | SKLAGIVIP | AAGAAGUGCAGCCACAUGAAGGUGGGCGAUACAGCCAGC | | | |
| | | NDGLCHLDS | UUCAGCGUGACCGUGAACAUCCCUCACUGCGAGAGAAGA | | | |
| | | KNEYSMSTV | AGCAGACACAUCAUCAUCAAGCCUGUGGGCCUUGGUGAC | | | |
| | | LEYPTIGOL | GCCCUGGAACUGCUGGUAUCACCAGAGUGCAACUGCGAC | | | |
| | | IDKLVQNNV | UGUCAGAAGGAAGUGGAGGUUAACUCUUCUAAGUGCCAC | | | |
| | | LLIFAVTQE | CACGGCAACGGAAGUUUCCAGUGCGGCGUCUGUGCGUGC | | | |
| | | QVHLYENYA | CACCCUGGCCACAUGGGCCCUCGAUGCGAGUGCGGAGAG | | | |
| | | KLIPGATVG | GACAUGCUCUCUACUGACAGCUGUAAGGAGGCCCCUGAC | | | |
| | | LLQKDSGNI | CAUCCGAGUUGUAGCGGCAGAGGCGACUGCUACUGCGGC | | | |
| | | LQLIISAYE | CAGUGCAUCUGCCAUCUAUCUCCAUACGGAAAUAUCUAC | | | |
| | | ELRSEVELE | GGCCCUUACUGCCAGUGCGACAAUUUCAGCUGCGUUAGA | | | |
| | | VLGDTEGLN | CACAAGGGUCUUCUGUGUGGAGGAAACGGCGAUUGUGAU | | | |
| | | LSFTAICNN | UGCGGUGAGUGCGUGUGCAGAAGCGGCUGGACCGGCGAG | | | |
| | | GTLFQHQKK | UACUGCAAUUGCACCACCUCCACUGACAGCUGCGUGAGC | | | |
| | | CSHMKVGDT | GAGGACGGCGUGCUGUGCAGCGGACGGGGCGACUGUGUU | | | |
| | | ASFSVTVNI | UGCGGCAAGUGUGUGUGCACCAAUCCUGGUGCUAGCGGC | | | |
| | | PHCERRSRH | CCUACUUGCGAAAGGUGCCCAACCUGUGGCGACCCGUGC | | | |
| | | IIIKPVGLG | AACUCCAAGAGAAGCUGCAUCGAGUGUCACCUAUCAGCU | | | |
| | | DALELLVSP | GCCGGCCAGGCCAGAGAGGAGUGUGUUGACAAGUGCAAG | | | |
| | | ECNCDCQKE | UUAGCUGGAGCAACAAUCAGCGAGGAGGAGGACUUCAGC | | | |
| | | VEVNSSKCH | AAGGACGGCAGCGUGAGCUGUAGUCUCCAAGGCGAGAAC | | | |
| | | HGNGSFQCG | GAGUGCCUGAUCACCUUCCUGAUUACUACCGACAACGAG | | | |
| | | VCACHPGHM | GGCAAGACCAUCAUCCACUCCAUCAACGAGAAGGACUGU | | | |
| | | GPRCECGED | CCUAAGCCUCCUAAUAUCCCUAUGAUCAUGCUUGGCGUG | | | |
| | | MLSTDSCKE | AGCCUGGCCAUUCUUCUGAUUGGAGUGGUGCUGCUCUGU | | | |
| | | APDHPSCSG | AUUUGGAAGCUACUGGUGAGCUUCCACGACAGAAAGGAA | | | |
| | | RGDCYCGQC | GUUGCCAAGUUCGAGGCGGAAAGGAGCAAGGCCAAGUGG | | | |
| | | ICHLSPYGN | CAGACCGGCACUAACCCUCUGUACAGAGGAAGUACCAGU | | | |
| | | IYGPYCQCD | ACAUUCAAGAACGUGACCUACAAGCACAGAGAGAAGCAG | | | |
| | | NFSCVRHKG | AAGGUGGAUCUUUCUACAGACUGCGGUAAGCCUAUCCCU | | | |
| | | LLCGGNGDC | AAUCCACUGUUGGGUUUGGAUUCCACC | | | |
| | | DCGECVCRS | | | | |
| | | GWTGEYCNC | | | | |
| | | TTSTDSCVS | | | | |
| | | EDGVLCSGR | | | | |
| | | GDCVCGKCV | | | | |
| | | CTNPGASGP | | | | |
| | | TCERCPTCG | | | | |
| | | DPCNSKRSC | | | | |
| | | IECHLSAAG | | | | |
| | | QAREECVDK | | | | |
| | | CKLAGATIS | | | | |
| | | EEEDFSKDG | | | | |
| | | SVSCSLQGE | | | | |
| | | NECLITFLI | | | | |
| | | TTDNEGKTI | | | | |
| | | IHSINEKDC | | | | |
| | | PKPPNIPMI | | | | |
| | | MLGVSLAIL | | | | |
| | | LIGVVLLCI | | | | |
| | | WKLLVSFHD | | | | |
| | | RKEVAKFEA | | | | |
| | | ERSKAKWQT | | | | |
| | | GTNPLYRGS | | | | |
| | | TSTFKNVTY | | | | |
| | | KHREKQKVD | | | | |
| | | LSTDCGKPI | | | | |
| | | PNPLLGLDS | | | | |
| | | T | | | | |
| | | 1 | 3 | 50 | 110 | 161 |
| Human | ITB6 | MGIELLCLF | AUGGGCAUCGAGCUGCUGUGCCUGUUCUUCCUGUUCCUGG | GGAAAUCG | UGAUAAUA | SEQ ID |
| Var- | G5 | FLFLGRNDH | GCAGAAACGACCACGUGCAGGGAGGUUGCGCCCUCGGAG | CAAAAUUU | GGCUGGAG | NO: 161 |
| iant | Cap C1 | VQGGCALGG | GUGCCGAGACAUGCGAGGACUGCCUGCUGAUCGGCCCUC | GCUCUUCG | CCUCGGUG | consists |
| 1.2 | Poly A | AETCEDCLL | AGUGCGCCUGGUGCGCCCAGGAGAACUUCACCCACCCUA | CGUUAGAU | GCCUAGCU | from 5′ |
| | tail: | IGPQCAWCA | GCGGCGUGGGCGAGAGGUGCGACACCCCUGCCAACCUGC | UUCUUUUA | UCUUGCCC | to 3′ |
| | 100 nt | QENFTHPSG | UGGCCAAGGGCUGCCAGCUGAACUUCAUCGAGAACCCUG | GUUUUCUC | CUUGGGCC | end: 5′ |
| | (SEQ ID | VGERCDTPA | UGAGCCAGGUGGAGAUCCUGAAGAACAAGCCUCUGAGCG | GCAACUAG | UCCCCCCA | UTR of |
| | NO: 502) | NLLAKGCQL | UGGGCAGACAGAAGAACAGCAGCGACAUCGUGCAGAUCG | CAAGCUUU | GCCCCUCC | SEQ ID |
| | | NFIENPVSQ | CCCCUCAGAGCCUGAUUUUGAAGCUCCGGCCUGGAGGAG | UUGUUCUC | UCCCCUUC | NO: 50, |
| | | VEILKNKPL | CACAGACCCUGCAGGUGCACGUGAGACAGACCGAGGACU | GCC | CUGCACCC | ORF |
| | | SVGRQKNSS | ACCCUGUGGACCUGUACUACCUGAUGGACCUGAGCGCCA | | GUACCCCC | sequence |
| | | DIVQIAPQS | GCAUGGACGACGACCUGAACACCAUCAAGGAGCUGGGCA | | CAAACACC | of SEQ |
| | | LILKLRPGG | GCAGACUGAGCAAGGAGAUGAGCAAGCUGACCAGCAACU | | AUUGUCAC | ID NO: |
| | | AQTLQVHVR | UCAGACUGGGCUUCGGCAGCUUCGUGGAGAAGCCUGUAU | | ACUCCAGU | 3, and |
| | | QTEDYPVDL | CGCCUUUCGUGAAGACCACCCCUGAGGAGAUCGCCAACC | | GGUCUUUG | 3′ UTR |
| | | YYLMDLSAS | CUUGCAGCAGCAUCCCUUACUUCUGCCUGCCUACCUUCG | | AAUAAAGU | sequence |
| | | MDDDLNTIK | GCUUCAAGCACAUCCUGCCUCUGACCAACGACGCCGAGA | | CUGAGUGG | of SEQ |
| | | ELGSRLSKE | GAUUCAACGAGAUAGUUAAGAACCAGAAGAUCAGCGCCA | | GCGGC | ID NO: |
| | | MSKLTSNFR | ACAUAGAUACUCCAGAAGGAGGUUUCGACGCCAUCAUGC | | | 110. |
| | | LGFGSFVEK | AGGCCGCCGUGUGUAAGGAGAAGAUCGGCUGGCGGAACG | | | |
| | | PVSPFVKTT | ACAGCCUGCAUCUUUUGGUGUUCGUGAGUGACGCAGACA | | | |
| | | PEEIANPCS | GCCACUUCGGCAUGGACUCUAAGUUAGCCGGCAUCGUGA | | | |
| | | SIPYFCLPT | UCCCUAACGACGGCCUGUGCCACCUGGACAGCAAGAACG | | | |
| | | FGFKHILPL | AGUACAGCAUGAGCACCGUGCUGGAGUACCCUACCAUCG | | | |
| | | TNDAERFNE | GUCAGCUGAUCGACAAGCUGGUGCAGAACAACGUGCUGC | | | |
| | | IVKNQKISA | UAAUCUUCGCCGUGACCCAGGAACAAGUCCACCUGUACG | | | |
| | | NIDTPEGGF | AGAACUACGCCAAGCUGAUCCCUGGCGCCACCGUGGGCC | | | |
| | | DAIMQAAVC | UGCUGCAGAAGGACAGCGGCAAUAUCUUGCAGUUGAUUA | | | |
| | | KEKIGWRND | UUUCCGCAUACGAGGAGCUGAGAAGCGAGGUGGAGCUGG | | | |
| | | SLHLLVFVS | AGGUGCUGGGCGACACCGAGGGCCUGAACCUGAGCUUCA | | | |
| | | DADSHFGMD | CCGCCAUCUGCAACAACGGCACCCUGUUCCAGCAUCAGA | | | |
| | | SKLAGIVIP | AGAAGUGCAGCCACAUGAAGGUGGGCGAUACAGCCAGCU | | | |
| | | NDGLCHLDS | UCAGCGUGACCGUGAACAUCCCUCACUGCGAGAGAAGAA | | | |
| | | KNEYSMSTV | GCAGACACAUCAUCAUCAAGCCUGUGGGCCUUGGUGACG | | | |
| | | LEYPTIGQL | CCCUGGAACUGCUGGUAUCACCAGAGUGCAACUGCGACU | | | |
| | | IDKLVQNNV | GUCAGAAGGAAGUGGAGGUUAACUCUUCUAAGUGCCACC | | | |
| | | LLIFAVTQE | ACGGCAACGGAAGUUUCCAGUGCGGCGUCUGUGCGUGCC | | | |
| | | QVHLYENYA | ACCCUGGCCACAUGGGCCCUCGAUGCGAGUGCGGAGAGG | | | |
| | | KLIPGATVG | ACAUGCUCUCUACUGACAGCUGUAAGGAGGCCCCUGACC | | | |
| | | LLQKDSGNI | AUCCGAGUUGUAGCGGCAGAGGCGACUGCUACUGCGGCC | | | |
| | | LQLIISAYE | AGUGCAUCUGCCAUCUAUCUCCAUACGGAAAUAUCUACG | | | |
| | | ELRSEVELE | GCCCUUACUGCCAGUGCGACAAUUUCAGCUGCGUUAGAC | | | |
| | | VLGDTEGLN | ACAAGGGUCUUCUGUGUGGAGGAAACGGCGAUUGUGAUU | | | |
| | | LSFTAICNN | GCGGUGAGUGCGUGUGCAGAAGCGGCUGGACCGGCGAGU | | | |
| | | GTLFQHQKK | ACUGCAAUUGCACCACCUCCACUGACAGCUGCGUGAGCG | | | |
| | | CSHMKVGDT | AGGACGGCGUGCUGUGCAGCGGACGGGGCGACUGUGUUU | | | |
| | | ASFSVTVNI | GCGGCAAGUGUGUGUGCACCAAUCCUGGUGCUAGCGGCC | | | |
| | | PHCERRSRH | CUACUUGCGAAAGGUGCCCAACCUGUGGCGACCCGUGCA | | | |
| | | IIIKPVGLG | ACUCCAAGAGAAGCUGCAUCGAGUGUCACCUAUCAGCUG | | | |
| | | DALELLVSP | CCGGCCAGGCCAGAGAGGAGUGUGUUGACAAGUGCAAGU | | | |
| | | ECNCDCQKE | UAGCUGGAGCAACAAUCAGCGAGGAGGAGGACUUCAGCA | | | |
| | | VEVNSSKCH | AGGACGGCAGCGUGAGCUGUAGUCUCCAAGGCGAGAACG | | | |
| | | HGNGSFQCG | AGUGCCUGAUCACCUUCCUGAUUACUACCGACAACGAGG | | | |
| | | VCACHPGHM | GCAAGACCAUCAUCCACUCCAUCAACGAGAAGGACUGUC | | | |
| | | GPRCECGED | CUAAGCCUCCUAAUAUCCCUAUGAUCAUGCUUGGCGUGA | | | |
| | | MLSTDSCKE | GCCUGGCCAUUCUUCUGAUUGGAGUGGUGCUGCUCUGUA | | | |
| | | APDHPSCSG | UUUGGAAGCUACUGGUGAGCUUCCACGACAGAAAGGAAG | | | |
| | | RGDCYCGQC | UUGCCAAGUUCGAGGCGGAAAGGAGCAAGGCCAAGUGGC | | | |
| | | ICHLSPYGN | AGACCGGCACUAACCCUCUGUACAGAGGAAGUACCAGUA | | | |
| | | IYGPYCQCD | CAUUCAAGAACGUGACCUACAAGCACAGAGAGAAGCAGA | | | |
| | | NFSCVRHKG | AGGUGGAUCUUUCUACAGACUGCGGUAAGCCUAUCCCUA | | | |
| | | LLCGGNGDC | AUCCACUGUUGGGUUUGGAUUCCACC | | | |
| | | DCGECVCRS | | | | |
| | | GWTGEYCNC | | | | |
| | | TTSTDSCVS | | | | |
| | | EDGVLCSGR | | | | |
| | | GDCVCGKCV | | | | |
| | | CTNPGASGP | | | | |
| | | TCERCPTCG | | | | |
| | | DPCNSKRSC | | | | |
| | | IECHLSAAG | | | | |
| | | QAREECVDK | | | | |
| | | CKLAGATIS | | | | |
| | | EEEDFSKDG | | | | |
| | | SVSCSLQGE | | | | |
| | | NECLITFLI | | | | |
| | | TTDNEGKTI | | | | |
| | | IHSINEKDC | | | | |
| | | PKPPNIPMI | | | | |
| | | MLGVSLAIL | | | | |
| | | LIGVVLLCI | | | | |
| | | WKLLVSFHD | | | | |
| | | RKEVAKFEA | | | | |
| | | ERSKAKWQT | | | | |
| | | GTNPLYRGS | | | | |
| | | TSTFKNVTY | | | | |
| | | KHREKQKVD | | | | |
| | | LSTDCGKPI | | | | |
| | | PNPLLGLDS | | | | |
| | | T | | | | |
| | | 1 | 4 | 50 | 143 | 162 |
| Human | ITB6 | MGIELLCLF | AUGGGCAUCGAGCUGCUGUGCCUGUUCUUCCUGUUCCUGG | GGAAAUCG | UAAGCCCC | SEQ ID |
| Var- | G5 | FLFLGRNDH | GCAGAAACGACCACGUGCAGGGAGGUUGCGCCCUCGGAG | CAAAAUUU | UCCGGGGG | NO: 162 |
| iant | Cap C1 | VQGGCALGG | GUGCCGAGACAUGCGAGGACUGCCUGCUGAUCGGCCCUC | GCUCUUCG | CCUCGGUG | consists |
| 1.3 | Poly A | AETCEDCLL | AGUGCGCCUGGUGCGCCCAGGAGAACUUCACCCACCCUA | CGUUAGAU | GCCUAGCU | from 5′ |
| | Tail: | IGPQCAWCA | GCGGCGUGGGCGAGAGGUGCGACACCCCUGCCAACCUGC | UUCUUUUA | UCUUGCCC | to 3′ |
| | 100 nt | QENFTHPSG | UGGCCAAGGGCUGCCAGCUGAACUUCAUCGAGAACCCUG | GUUUUCUC | CUUGGGCC | end: 5′ |
| | (SEQ ID | VGERCDTPA | UGAGCCAGGUGGAGAUCCUGAAGAACAAGCCUCUGAGCG | GCAACUAG | UCCCCCCA | UTR of |
| | NO: 502) | NLLAKGCQL | UGGGCAGACAGAAGAACAGCAGCGACAUCGUGCAGAUCG | CAAGCUUU | GCCCCUCC | SEQ ID |
| | | NFIENPVSQ | CCCCUCAGAGCCUGAUUUUGAAGCUCCGGCCUGGAGGAG | UUGUUCUC | UCCCCUUC | NO: 50, |
| | | VEILKNKPL | CACAGACCCUGCAGGUGCACGUGAGACAGACCGAGGACU | GCC | CUGCACCC | ORF |
| | | SVGRQKNSS | ACCCUGUGGACCUGUACUACCUGAUGGACCUGAGCGCCA | | GUACCCCC | sequence |
| | | DIVQIAPQS | GCAUGGACGACGACCUGAACACCAUCAAGGAGCUGGGCA | | CAAACACC | of SEQ |
| | | LILKLRPGG | GCAGACUGAGCAAGGAGAUGAGCAAGCUGACCAGCAACU | | AUUGUCAC | ID NO: |
| | | AQTLQVHVR | UCAGACUGGGCUUCGGCAGCUUCGUGGAGAAGCCUGUAU | | ACUCCAGU | 4, and |
| | | QTEDYPVDL | CGCCUUUCGUGAAGACCACCCCUGAGGAGAUCGCCAACC | | GGUCUUUG | 3′ UTR |
| | | YYLMDLSAS | CUUGCAGCAGCAUCCCUUACUUCUGCCUGCCUACCUUCG | | AAUAAAGU | sequence |
| | | MDDDLNTIK | GCUUCAAGCACAUCCUGCCUCUGACCAACGACGCCGAGA | | CUGAGUGG | of SEQ |
| | | ELGSRLSKE | GAUUCAACGAGAUAGUUAAGAACCAGAAGAUCAGCGCCA | | GCGGC | ID NO: |
| | | MSKLTSNFR | ACAUAGAUACUCCAGAAGGAGGUUUCGACGCCAUCAUGC | | | 143. |
| | | LGFGSFVEK | AGGCCGCCGUGUGUAAGGAGAAGAUCGGCUGGCGGAACG | | | |
| | | PVSPFVKTT | ACAGCCUGCAUCUUUUGGUGUUCGUGAGUGACGCAGACA | | | |
| | | PEEIANPCS | GCCACUUCGGCAUGGACUCUAAGUUAGCCGGCAUCGUGA | | | |
| | | SIPYFCLPT | UCCCUAACGACGGCCUGUGCCACCUGGACAGCAAGAACG | | | |
| | | FGFKHILPL | AGUACAGCAUGAGCACCGUGCUGGAGUACCCUACCAUCG | | | |
| | | TNDAERFNE | GUCAGCUGAUCGACAAGCUGGUGCAGAACAACGUGCUGC | | | |
| | | IVKNQKISA | UAAUCUUCGCCGUGACCCAGGAACAAGUCCACCUGUACG | | | |
| | | NIDTPEGGF | AGAACUACGCCAAGCUGAUCCCUGGCGCCACCGUGGGCC | | | |
| | | DAIMQAAVC | UGCUGCAGAAGGACAGCGGCAAUAUCUUGCAGUUGAUUA | | | |
| | | KEKIGWRND | UUUCCGCAUACGAGGAGCUGAGAAGCGAGGUGGAGCUGG | | | |
| | | SLHLLVFVS | AGGUGCUGGGCGACACCGAGGGCCUGAACCUGAGCUUCA | | | |
| | | DADSHFGMD | CCGCCAUCUGCAACAACGGCACCCUGUUCCAGCAUCAGA | | | |
| | | SKLAGIVIP | AGAAGUGCAGCCACAUGAAGGUGGGCGAUACAGCCAGCU | | | |
| | | NDGLCHLDS | UCAGCGUGACCGUGAACAUCCCUCACUGCGAGAGAAGAA | | | |
| | | KNEYSMSTV | GCAGACACAUCAUCAUCAAGCCUGUGGGCCUUGGUGACG | | | |
| | | LEYPTIGQL | CCCUGGAACUGCUGGUAUCACCAGAGUGCAACUGCGACU | | | |
| | | IDKLVQNNV | GUCAGAAGGAAGUGGAGGUUAACUCUUCUAAGUGCCACC | | | |
| | | LLIFAVTQE | ACGGCAACGGAAGUUUCCAGUGCGGCGUCUGUGCGUGCC | | | |
| | | QVHLYENYA | ACCCUGGCCACAUGGGCCCUCGAUGCGAGUGCGGAGAGG | | | |
| | | KLIPGATVG | ACAUGCUCUCUACUGACAGCUGUAAGGAGGCCCCUGACC | | | |
| | | LLQKDSGNI | AUCCGAGUUGUAGCGGCAGAGGCGACUGCUACUGCGGCC | | | |
| | | LQLIISAYE | AGUGCAUCUGCCAUCUAUCUCCAUACGGAAAUAUCUACG | | | |
| | | ELRSEVELE | GCCCUUACUGCCAGUGCGACAAUUUCAGCUGCGUUAGAC | | | |
| | | VLGDTEGLN | ACAAGGGUCUUCUGUGUGGAGGAAACGGCGAUUGUGAUU | | | |
| | | LSFTAICNN | GCGGUGAGUGCGUGUGCAGAAGCGGCUGGACCGGCGAGU | | | |
| | | GTLFQHQKK | ACUGCAAUUGCACCACCUCCACUGACAGCUGCGUGAGCG | | | |
| | | CSHMKVGDT | AGGACGGCGUGCUGUGCAGCGGACGGGGCGACUGUGUUU | | | |
| | | ASFSVTVNI | GCGGCAAGUGUGUGUGCACCAAUCCUGGUGCUAGCGGCC | | | |
| | | PHCERRSRH | CUACUUGCGAAAGGUGCCCAACCUGUGGCGACCCGUGCA | | | |
| | | IIIKPVGLG | ACUCCAAGAGAAGCUGCAUCGAGUGUCACCUAUCAGCUG | | | |
| | | DALELLVSP | CCGGCCAGGCCAGAGAGGAGUGUGUUGACAAGUGCAAGU | | | |
| | | ECNCDCQKE | UAGCUGGAGCAACAAUCAGCGAGGAGGAGGACUUCAGCA | | | |
| | | VEVNSSKCH | AGGACGGCAGCGUGAGCUGUAGUCUCCAAGGCGAGAACG | | | |
| | | HGNGSFQCG | AGUGCCUGAUCACCUUCCUGAUUACUACCGACAACGAGG | | | |
| | | VCACHPGHM | GCAAGACCAUCAUCCACUCCAUCAACGAGAAGGACUGUC | | | |
| | | GPRCECGED | CUAAGCCUCCUAAUAUCCCUAUGAUCAUGCUUGGCGUGA | | | |
| | | MLSTDSCKE | GCCUGGCCAUUCUUCUGAUUGGAGUGGUGCUGCUCUGUA | | | |
| | | APDHPSCSG | UUUGGAAGCUACUGGUGAGCUUCCACGACAGAAAGGAAG | | | |
| | | RGDCYCGQC | UUGCCAAGUUCGAGGCGGAAAGGAGCAAGGCCAAGUGGC | | | |
| | | ICHLSPYGN | AGACCGGCACUAACCCUCUGUACAGAGGAAGUACCAGUA | | | |
| | | IYGPYCQCD | CAUUCAAGAACGUGACCUACAAGCACAGAGAGAAGCAGA | | | |
| | | NFSCVRHKG | AGGUGGAUCUUUCUACAGACUGCGGUAAGCCUAUCCCUA | | | |
| | | LLCGGNGDC | AUCCACUGUUGGGUUUGGAUUCCACC | | | |
| | | DCGECVCRS | | | | |
| | | GWTGEYCNC | | | | |
| | | TTSTDSCVS | | | | |
| | | EDGVLCSGR | | | | |
| | | GDCVCGKCV | | | | |
| | | CTNPGASGP | | | | |
| | | TCERCPTCG | | | | |
| | | DPCNSKRSC | | | | |
| | | IECHLSAAG | | | | |
| | | QAREECVDK | | | | |
| | | CKLAGATIS | | | | |
| | | EEEDFSKDG | | | | |
| | | SVSCSLQGE | | | | |
| | | NECLITFLI | | | | |
| | | TTDNEGKTI | | | | |
| | | IHSINEKDC | | | | |
| | | PKPPNIPMI | | | | |
| | | MLGVSLAIL | | | | |
| | | LIGVVLLCI | | | | |
| | | WKLLVSFHD | | | | |
| | | RKEVAKFEA | | | | |
| | | ERSKAKWQT | | | | |
| | | GTNPLYRGS | | | | |
| | | TSTFKNVTY | | | | |
| | | KHREKQKVD | | | | |
| | | LSTDCGKPI | | | | |
| | | PNPLLGLDS | | | | |
| | | T | | | | |
| | | 1 | 5 | 50 | 110 | 163 |
| Human | ITB6 | MGIELLCLF | AUGGGGAUCGAGCUGCUGUGCCUGUUCUUCCUGUUCCUGG | GGAAAUCG | UGAUAAUA | SEQ ID |
| Var- | G5 | FLFLGRNDH | GACGGAACGACCACGUGCAGGGUGGCUGCGCCCUUGGUG | CAAAAUUU | GGCUGGAG | NO: 163 |
| iant | Cap C1 | VQGGCALGG | GGGCAGAGACCUGCGAGGACUGCCUGCUCAUCGGCCCAC | GCUCUUCG | CCUCGGUG | consists |
| 1.4 | Poly A | AETCEDCLL | AGUGCGCCUGGUGCGCUCAGGAGAACUUCACCCACCCCA | CGUUAGAU | GCCUAGCU | from 5′ |
| | Tail: | IGPQCAWCA | GCGGAGUGGGCGAGAGGUGCGACACCCCGGCCAACCUGC | UUCUUUUA | UCUUGCCC | to 3′ |
| | 100 nt | QENFTHPSG | UGGCCAAGGGGUGCCAGCUGAACUUCAUCGAGAACCCCG | GUUUUCUC | CUUGGGCC | end: 5′ |
| | (SEQ ID | VGERCDTPA | UCUCUCAGGUGGAGAUCCUGAAGAACAAGCCCCUCAGCG | GCAACUAG | UCCCCCCA | UTR of |
| | NO: 502) | NLLAKGCQL | UUGGGCGGCAGAAGAACAGCUCUGACAUCGUGCAGAUCG | CAAGCUUU | GCCCCUCC | SEQ ID |
| | | NFIENPVSQ | CGCCCCAGAGCCUGAUCCUGAAACUACGGCCUGGCGGUG | UUGUUCUC | UCCCCUUC | NO: 50, |
| | | VEILKNKPL | CGCAAACCCUGCAGGUCCACGUGCGGCAGACCGAGGACU | GCC | CUGCACCC | ORF |
| | | SVGRQKNSS | ACCCUGUGGACCUGUACUACCUGAUGGACCUCUCCGCCA | | GUACCCCC | sequence |
| | | DIVQIAPQS | GCAUGGACGACGAUCUGAACACCAUCAAGGAGCUGGGCA | | CAAACACC | of SEQ |
| | | LILKLRPGG | GCCGCCUGAGCAAGGAGAUGUCCAAGCUGACCUCCAACU | | AUUGUCAC | ID NO: |
| | | AQTLQVHVR | UCCGCCUGGGGUUCGGAUCCUUCGUGGAGAAGCCCGUGA | | ACUCCAGU | 5, and |
| | | QTEDYPVDL | GCCCCUUCGUGAAGACCACCCCUGAGGAGAUCGCCAACC | | GGUCUUUG | 3′ UTR |
| | | YYLMDLSAS | CCUGCAGCAGCAUCCCUUACUUCUGCCUGCCCACCUUCG | | AAUAAAGU | sequence |
| | | MDDDLNTIK | GCUUCAAGCACAUCCUGCCACUGACCAACGACGCCGAGC | | CUGAGUGG | of SEQ |
| | | ELGSRLSKE | GGUUCAACGAGAUCGUGAAGAACCAGAAGAUCAGCGCCA | | GCGGC | ID NO: |
| | | MSKLTSNFR | ACAUCGACACCCCGGAGGGUGGGUUCGACGCUAUCAUGC | | | 110. |
| | | LGFGSFVEK | AGGCCGCCGUGUGCAAGGAGAAGAUCGGCUGGCGCAACG | | | |
| | | PVSPFVKTT | ACAGCCUGCACCUGCUGGUGUUCGUGUCCGACGCCGACU | | | |
| | | PEEIANPCS | CCCACUUCGGCAUGGACAGCAAGCUGGCCGGUAUCGUGA | | | |
| | | SIPYFCLPT | UCCCUAACGACGGCCUGUGCCACCUGGACAGCAAGAACG | | | |
| | | FGFKHILPL | AGUACAGCAUGAGCACCGUGCUGGAGUACCCCACCAUCG | | | |
| | | TNDAERFNE | GCCAGCUGAUCGACAAGCUGGUGCAGAACAACGUGCUGC | | | |
| | | IVKNQKISA | UGAUCUUCGCCGUGACCCAGGAGCAGGUGCACCUCUACG | | | |
| | | NIDTPEGGF | AGAACUACGCCAAGCUGAUUCCAGGCGCCACCGUCGGUC | | | |
| | | DAIMQAAVC | UGCUGCAGAAGGACAGCGGCAACAUCCUGCAGCUGAUCA | | | |
| | | KEKIGWRND | UCUCCGCCUACGAGGAGCUGAGGAGCGAGGUGGAGCUGG | | | |
| | | SLHLLVFVS | AGGUGCUCGGGGACACCGAGGGCCUGAACCUGUCCUUCA | | | |
| | | DADSHFGMD | CCGCCAUCUGCAACAACGGGACCCUCUUCCAGCACCAGA | | | |
| | | SKLAGIVIP | AGAAGUGCAGCCACAUGAAGGUGGGCGACACCGCCAGCU | | | |
| | | NDGLCHLDS | UCAGCGUCACCGUGAACAUACCUCACUGUGAGCGGCGGA | | | |
| | | KNEYSMSTV | GCAGGCACAUCAUCAUCAAGCCCGUGGGCCUGGGAGACG | | | |
| | | LEYPTIGQL | CCCUGGAGCUGCUGGUGUCUCCCGAGUGCAACUGCGACU | | | |
| | | IDKLVQNNV | GCCAGAAGGAGGUGGAGGUGAACUCUAGCAAGUGCCACC | | | |
| | | LLIFAVTQE | ACGGCAACGGGAGUUUCCAGUGUGGCGUGUGUGCCUGCC | | | |
| | | QVHLYENYA | ACCCCGGUCACAUGGGACCCCGGUGUGAGUGCGGGGAGG | | | |
| | | KLIPGATVG | ACAUGCUGAGCACCGACAGCUGCAAGGAGGCCCCAGACC | | | |
| | | LLQKDSGNI | ACCCGAGCUGUUCCGGUCGGGGCGACUGCUACUGCGGCC | | | |
| | | LQLIISAYE | AGUGCAUCUGUCACCUGAGCCCCUACGGCAACAUCUACG | | | |
| | | ELRSEVELE | GGCCCUACUGCCAGUGCGACAACUUCUCCUGCGUGCGCC | | | |
| | | VLGDTEGLN | ACAAAGGCCUGCUGUGUGGCGGCAACGGCGACUGCGACU | | | |
| | | LSFTAICNN | GCGGGGAGUGCGUGUGCCGCAGUGGGUGGACCGGCGAGU | | | |
| | | GTLFQHQKK | ACUGCAACUGCACCACCUCCACCGACUCUUGCGUGUCCG | | | |
| | | CSHMKVGDT | AGGACGGGGUGCUGUGUUCCGGGCGCGGAGAUUGCGUGU | | | |
| | | ASFSVTVNI | GCGGGAAGUGCGUGUGCACCAACCCUGGCGCAUCGGGUC | | | |
| | | PHCERRSRH | CUACCUGCGAGAGGUGCCCCACCUGUGGCGACCCCUGCA | | | |
| | | IIIKPVGLG | ACAGCAAGCGCUCUUGCAUCGAGUGCCACCUCUCAGCAG | | | |
| | | DALELLVSP | CAGGGCAGGCUCGGGAGGAGUGCGUGGACAAGUGCAAGC | | | |
| | | ECNCDCQKE | UCGCCGGCGCCACCAUCAGUGAGGAGGAGGACUUCUCCA | | | |
| | | VEVNSSKCH | AGGACGGCAGCGUGUCCUGCUCCCUCCAGGGCGAGAACG | | | |
| | | HGNGSFQCG | AGUGCCUCAUCACCUUCCUGAUCACCACCGACAACGAGG | | | |
| | | VCACHPGHM | GCAAGACCAUCAUCCACUCCAUCAACGAGAAGGACUGCC | | | |
| | | GPRCECGED | CCAAGCCGCCUAACAUCCCCAUGAUCAUGCUGGGCGUGA | | | |
| | | MLSTDSCKE | GCCUGGCCAUCCUGCUGAUCGGCGUGGUGCUGCUGUGCA | | | |
| | | APDHPSCSG | UCUGGAAGCUGCUGGUCUCCUUCCACGACCGCAAGGAGG | | | |
| | | RGDCYCGQC | UGGCCAAGUUCGAGGCCGAGCGCUCUAAGGCCAAGUGGC | | | |
| | | ICHLSPYGN | AGACCGGCACCAACCCUCUGUACCGGGGCUCCACCAGCA | | | |
| | | IYGPYCQCD | CCUUCAAGAACGUGACCUACAAGCACCGCGAGAAGCAGA | | | |
| | | NFSCVRHKG | AGGUGGACCUGUCCACCGACUGUGGCAAGCCCAUCCCCA | | | |
| | | LLCGGNGDC | AUCCCCUGCUGGGGCUGGACUCCACC | | | |
| | | DCGECVCRS | | | | |
| | | GWTGEYCNC | | | | |
| | | TTSTDSCVS | | | | |
| | | EDGVLCSGR | | | | |
| | | GDCVCGKCV | | | | |
| | | CTNPGASGP | | | | |
| | | TCERCPTCG | | | | |
| | | DPCNSKRSC | | | | |
| | | IECHLSAAG | | | | |
| | | QAREECVDK | | | | |
| | | CKLAGATIS | | | | |
| | | EEEDFSKDG | | | | |
| | | SVSCSLQGE | | | | |
| | | NECLITFLI | | | | |
| | | TTDNEGKTI | | | | |
| | | IHSINEKDC | | | | |
| | | PKPPNIPMI | | | | |
| | | MLGVSLAIL | | | | |
| | | LIGVVLLCI | | | | |
| | | WKLLVSFHD | | | | |
| | | RKEVAKFEA | | | | |
| | | ERSKAKWQT | | | | |
| | | GTNPLYRGS | | | | |
| | | TSTFKNVTY | | | | |
| | | KHREKQKVD | | | | |
| | | LSTDCGKPI | | | | |
| | | PNPLLGLDS | | | | |
| | | T | | | | |
| | | 1 | 5 | 50 | 144 | 164 |
| Human | ITB6 | MGIELLCLF | AUGGGGAUCGAGCUGCUGUGCCUGUUCUUCCUGUUCCUGG | GGAAAUCG | UAAGCCCC | SEQ ID |
| Var- | G5 | FLFLGRNDH | GACGGAACGACCACGUGCAGGGUGGCUGCGCCCUUGGUG | CAAAAUUU | UCCGGGGG | NO: 164 |
| iant | Cap C1 | VQGGCALGG | GGGCAGAGACCUGCGAGGACUGCCUGCUCAUCGGCCCAC | GCUCUUCG | CCUCCUGA | consists |
| 1.5 | Poly A | AETCEDCLL | AGUGCGCCUGGUGCGCUCAGGAGAACUUCACCCACCCCA | CGUUAGAU | GAGACCUG | from 5′ |
| | Tail: | IGPQCAWCA | GCGGAGUGGGCGAGAGGUGCGACACCCCGGCCAACCUGC | UUCUUUUA | UGUGAACU | to 3′ |
| | 100 nt | QENFTHPSG | UGGCCAAGGGGUGCCAGCUGAACUUCAUCGAGAACCCCG | GUUUUCUC | AUUGAGAA | end: 5′ |
| | (SEQ ID | VGERCDTPA | UCUCUCAGGUGGAGAUCCUGAAGAACAAGCCCCUCAGCG | GCAACUAG | GAUCGGAA | UTR of |
| | NO: 502) | NLLAKGCQL | UUGGGCGGCAGAAGAACAGCUCUGACAUCGUGCAGAUCG | CAAGCUUU | CAGCUCCU | SEQ ID |
| | | NFIENPVSQ | CGCCCCAGAGCCUGAUCCUGAAACUACGGCCUGGCGGUG | UUGUUCUC | UACUCUGA | NO: 50, |
| | | VEILKNKPL | CGCAAACCCUGCAGGUCCACGUGCGGCAGACCGAGGACU | GCC | GGAAGUUG | ORF |
| | | SVGRQKNSS | ACCCUGUGGACCUGUACUACCUGAUGGACCUCUCCGCCA | | GUACCCCC | sequence |
| | | DIVQIAPQS | GCAUGGACGACGAUCUGAACACCAUCAAGGAGCUGGGCA | | CAAACACC | of SEQ |
| | | LILKLRPGG | GCCGCCUGAGCAAGGAGAUGUCCAAGCUGACCUCCAACU | | AUUGUCAC | ID NO: |
| | | AQTLQVHVR | UCCGCCUGGGGUUCGGAUCCUUCGUGGAGAAGCCCGUGA | | ACUCCAGU | 5, and |
| | | QTEDYPVDL | GCCCCUUCGUGAAGACCACCCCUGAGGAGAUCGCCAACC | | GGUCUUUG | 3′ UTR |
| | | YYLMDLSAS | CCUGCAGCAGCAUCCCUUACUUCUGCCUGCCCACCUUCG | | AAUAAAGU | sequence |
| | | MDDDLNTIK | GCUUCAAGCACAUCCUGCCACUGACCAACGACGCCGAGC | | CUGAGUGG | of SEQ |
| | | ELGSRLSKE | GGUUCAACGAGAUCGUGAAGAACCAGAAGAUCAGCGCCA | | GCGGC | ID NO: |
| | | MSKLTSNFR | ACAUCGACACCCCGGAGGGUGGGUUCGACGCUAUCAUGC | | | 144. |
| | | LGFGSFVEK | AGGCCGCCGUGUGCAAGGAGAAGAUCGGCUGGCGCAACG | | | |
| | | PVSPFVKTT | ACAGCCUGCACCUGCUGGUGUUCGUGUCCGACGCCGACU | | | |
| | | PEEIANPCS | CCCACUUCGGCAUGGACAGCAAGCUGGCCGGUAUCGUGA | | | |
| | | SIPYFCLPT | UCCCUAACGACGGCCUGUGCCACCUGGACAGCAAGAACG | | | |
| | | FGFKHILPL | AGUACAGCAUGAGCACCGUGCUGGAGUACCCCACCAUCG | | | |
| | | TNDAERFNE | GCCAGCUGAUCGACAAGCUGGUGCAGAACAACGUGCUGC | | | |
| | | IVKNQKISA | UGAUCUUCGCCGUGACCCAGGAGCAGGUGCACCUCUACG | | | |
| | | NIDTPEGGF | AGAACUACGCCAAGCUGAUUCCAGGCGCCACCGUCGGUC | | | |
| | | DAIMQAAVC | UGCUGCAGAAGGACAGCGGCAACAUCCUGCAGCUGAUCA | | | |
| | | KEKIGWRND | UCUCCGCCUACGAGGAGCUGAGGAGCGAGGUGGAGCUGG | | | |
| | | SLHLLVFVS | AGGUGCUCGGGGACACCGAGGGCCUGAACCUGUCCUUCA | | | |
| | | DADSHFGMD | CCGCCAUCUGCAACAACGGGACCCUCUUCCAGCACCAGA | | | |
| | | SKLAGIVIP | AGAAGUGCAGCCACAUGAAGGUGGGCGACACCGCCAGCU | | | |
| | | NDGLCHLDS | UCAGCGUCACCGUGAACAUACCUCACUGUGAGCGGCGGA | | | |
| | | KNEYSMSTV | GCAGGCACAUCAUCAUCAAGCCCGUGGGCCUGGGAGACG | | | |
| | | LEYPTIGQL | CCCUGGAGCUGCUGGUGUCUCCCGAGUGCAACUGCGACU | | | |
| | | IDKLVQNNV | GCCAGAAGGAGGUGGAGGUGAACUCUAGCAAGUGCCACC | | | |
| | | LLIFAVTQE | ACGGCAACGGGAGUUUCCAGUGUGGCGUGUGUGCCUGCC | | | |
| | | QVHLYENYA | ACCCCGGUCACAUGGGACCCCGGUGUGAGUGCGGGGAGG | | | |
| | | KLIPGATVG | ACAUGCUGAGCACCGACAGCUGCAAGGAGGCCCCAGACC | | | |
| | | LLQKDSGNI | ACCCGAGCUGUUCCGGUCGGGGCGACUGCUACUGCGGCC | | | |
| | | LQLIISAYE | AGUGCAUCUGUCACCUGAGCCCCUACGGCAACAUCUACG | | | |
| | | ELRSEVELE | GGCCCUACUGCCAGUGCGACAACUUCUCCUGCGUGCGCC | | | |
| | | VLGDTEGLN | ACAAAGGCCUGCUGUGUGGCGGCAACGGCGACUGCGACU | | | |
| | | LSFTAICNN | GCGGGGAGUGCGUGUGCCGCAGUGGGUGGACCGGCGAGU | | | |
| | | GTLFQHQKK | ACUGCAACUGCACCACCUCCACCGACUCUUGCGUGUCCG | | | |
| | | CSHMKVGDT | AGGACGGGGUGCUGUGUUCCGGGCGCGGAGAUUGCGUGU | | | |
| | | ASFSVTVNI | GCGGGAAGUGCGUGUGCACCAACCCUGGCGCAUCGGGUC | | | |
| | | PHCERRSRH | CUACCUGCGAGAGGUGCCCCACCUGUGGCGACCCCUGCA | | | |
| | | IIIKPVGLG | ACAGCAAGCGCUCUUGCAUCGAGUGCCACCUCUCAGCAG | | | |
| | | DALELLVSP | CAGGGCAGGCUCGGGAGGAGUGCGUGGACAAGUGCAAGC | | | |
| | | ECNCDCQKE | UCGCCGGCGCCACCAUCAGUGAGGAGGAGGACUUCUCCA | | | |
| | | VEVNSSKCH | AGGACGGCAGCGUGUCCUGCUCCCUCCAGGGCGAGAACG | | | |
| | | HGNGSFQCG | AGUGCCUCAUCACCUUCCUGAUCACCACCGACAACGAGG | | | |
| | | VCACHPGHM | GCAAGACCAUCAUCCACUCCAUCAACGAGAAGGACUGCC | | | |
| | | GPRCECGED | CCAAGCCGCCUAACAUCCCCAUGAUCAUGCUGGGCGUGA | | | |
| | | MLSTDSCKE | GCCUGGCCAUCCUGCUGAUCGGCGUGGUGCUGCUGUGCA | | | |
| | | APDHPSCSG | UCUGGAAGCUGCUGGUCUCCUUCCACGACCGCAAGGAGG | | | |
| | | RGDCYCGQC | UGGCCAAGUUCGAGGCCGAGCGCUCUAAGGCCAAGUGGC | | | |
| | | ICHLSPYGN | AGACCGGCACCAACCCUCUGUACCGGGGCUCCACCAGCA | | | |
| | | IYGPYCQCD | CCUUCAAGAACGUGACCUACAAGCACCGCGAGAAGCAGA | | | |
| | | NFSCVRHKG | AGGUGGACCUGUCCACCGACUGUGGCAAGCCCAUCCCCA | | | |
| | | LLCGGNGDC | AUCCCCUGCUGGGGCUGGACUCCACC | | | |
| | | DCGECVCRS | | | | |
| | | GWTGEYCNC | | | | |
| | | TTSTDSCVS | | | | |
| | | EDGVLCSGR | | | | |
| | | GDCVCGKCV | | | | |
| | | CTNPGASGP | | | | |
| | | TCERCPTCG | | | | |
| | | DPCNSKRSC | | | | |
| | | IECHLSAAG | | | | |
| | | QAREECVDK | | | | |
| | | CKLAGATIS | | | | |
| | | EEEDFSKDG | | | | |
| | | SVSCSLQGE | | | | |
| | | NECLITFLI | | | | |
| | | TTDNEGKTI | | | | |
| | | IHSINEKDC | | | | |
| | | PKPPNIPMI | | | | |
| | | MLGVSLAIL | | | | |
| | | LIGVVLLCI | | | | |
| | | WKLLVSFHD | | | | |
| | | RKEVAKFEA | | | | |
| | | ERSKAKWQT | | | | |
| | | GTNPLYRGS | | | | |
| | | TSTFKNVTY | | | | |
| | | KHREKQKVD | | | | |
| | | LSTDCGKPI | | | | |
| | | PNPLLGLDS | | | | |
| | | T | | | | |
| | | 1 | 6 | 50 | 110 | 165 |
| Human | ITB6 | MGIELLCLF | AUGGGUAUCGAGCUGCUGUGUCUGUUCUUUCUGUUUCUGG | GGAAAUCG | UGAUAAUA | SEQ ID |
| Var- | G5 | FLFLGRNDH | GCCGCAACGACCACGUCCAGGGCGGCUGCGCCCUGGGCG | CAAAAUUU | GGCUGGAG | NO: 165 |
| iant | Cap C1 | VQGGCALGG | GGGCCGAGACCUGCGAGGACUGCCUGCUCAUCGGGCCAC | GCUCUUCG | CCUCGGUG | consists |
| 1.6 | Poly A | AETCEDCLL | AGUGUGCCUGGUGUGCACAGGAGAACUUCACCCACCCCA | CGUUAGAU | GCCUAGCU | from 5′ |
| | Tail: | IGPQCAWCA | GCGGGGUGGGCGAGAGGUGCGACACCCCUGCAAAUCUGC | UUCUUUUA | UCUUGCCC | to 3′ |
| | 100 nt | QENFTHPSG | UGGCAAAGGGCUGCCAGCUGAAUUUCAUCGAGAAUCCCG | GUUUUCUC | CUUGGGCC | end: 5′ |
| | (SEQ ID | VGERCDTPA | UCAGCCAGGUGGAGAUUCUCAAGAACAAGCCUCUGAGCG | GCAACUAG | UCCCCCCA | UTR of |
| | NO: 502) | NLLAKGCOL | UCGGACGGCAGAAGAACUCUUCUGACAUCGUCCAGAUCG | CAAGCUUU | GCCCCUCC | SEQ ID |
| | | NFIENPVSQ | CACCUCAGAGCCUGAUUCUGAAGCUCCGCCCAGGCGGAG | UUGUUCUC | UCCCCUUC | NO: 50, |
| | | VEILKNKPL | CUCAGACCCUCCAGGUCCACGUCAGGCAGACUGAGGACU | GCC | CUGCACCC | ORF |
| | | SVGRQKNSS | ACCCCGUGGACCUGUACUACCUGAUGGAUCUGUCCGCCA | | GUACCCCC | sequence |
| | | DIVQIAPQS | GCAUGGACGACGAUCUGAACACCAUUAAGGAGCUGGGCA | | CAAACACC | of SEQ |
| | | LILKLRPGG | GCCGGCUCUCUAAGGAGAUGUCCAAGCUCACCAGCAACU | | AUUGUCAC | ID NO: |
| | | AQTLQVHVR | UCAGGCUGGGAUUCGGCAGCUUUGUCGAGAAGCCUGUGU | | ACUCCAGU | 6, and |
| | | QTEDYPVDL | CUCCUUUCGUGAAGACCACACCAGAGGAGAUCGCAAACC | | GGUCUUUG | 3′ UTR |
| | | YYLMDLSAS | CCUGUAGCAGCAUCCCCUACUUCUGCCUGCCUACAUUCG | | AAUAAAGU | sequence |
| | | MDDDLNTIK | GGUUCAAGCACAUUCUGCCUCUGACCAACGACGCAGAGC | | CUGAGUGG | of SEQ |
| | | ELGSRLSKE | GCUUUAACGAGAUCGUGAAGAAUCAGAAGAUCAGCGCCA | | GCGGC | ID NO: |
| | | MSKLTSNFR | ACAUUGAUACUCCUGAGGGCGGCUUCGACGCCAUCAUGC | | | 110. |
| | | LGFGSFVEK | AGGCUGCCGUCUGCAAGGAGAAGAUCGGGUGGAGGAACG | | | |
| | | PVSPFVKTT | ACAGCCUCCACCUGCUCGUGUUCGUGAGCGACGCCGACA | | | |
| | | PEEIANPCS | GCCACUUUGGGAUGGACUCCAAGCUGGCCGGCAUCGUGA | | | |
| | | SIPYFCLPT | UCCCCAACGACGGGCUGUGUCACCUCGAUUCCAAGAACG | | | |
| | | FGFKHILPL | AGUACAGCAUGAGCACCGUGCUGGAGUACCCCACCAUUG | | | |
| | | TNDAERFNE | GGCAGCUCAUUGAUAAGCUCGUGCAGAACAACGUCCUGC | | | |
| | | IVKNQKISA | UGAUCUUUGCAGUGACACAGGAGCAGGUGCACCUGUACG | | | |
| | | NIDTPEGGF | AGAAUUACGCAAAGCUCAUCCCCGGAGCCACUGUGGGCC | | | |
| | | DAIMQAAVC | UCCUGCAGAAGGACUCCGGGAACAUCCUCCAGCUCAUCA | | | |
| | | KEKIGWRND | UCUCCGCCUACGAGGAGCUGAGGAGCGAGGUGGAGCUCG | | | |
| | | SLHLLVFVS | AGGUCCUCGGGGACACCGAGGGCCUCAACCUGAGCUUUA | | | |
| | | DADSHFGMD | CCGCCAUCUGUAACAACGGAACUCUCUUCCAGCACCAGA | | | |
| | | SKLAGIVIP | AGAAGUGCUCUCACAUGAAGGUGGGCGACACCGCCUCCU | | | |
| | | NDGLCHLDS | UCAGCGUGACCGUGAACAUCCCUCACUGUGAGCGGCGGA | | | |
| | | KNEYSMSTV | GCCGCCACAUCAUCAUCAAGCCCGUGGGGCUCGGGGACG | | | |
| | | LEYPTIGQL | CCCUGGAGCUCCUGGUGUCCCCUGAGUGUAACUGCGACU | | | |
| | | IDKLVQNNV | GCCAGAAGGAGGUCGAGGUGAACAGCUCUAAGUGCCACC | | | |
| | | LLIFAVTQE | ACGGCAACGGGAGCUUCCAGUGCGGGGUGUGCGCAUGCC | | | |
| | | QVHLYENYA | ACCCCGGCCACAUGGGGCCUCGCUGCGAGUGCGGCGAGG | | | |
| | | KLIPGATVG | ACAUGCUGUCUACCGACAGCUGCAAGGAGGCCCCUGACC | | | |
| | | LLQKDSGNI | ACCCUAGCUGCUCUGGCCGCGGAGACUGCUACUGCGGCC | | | |
| | | LQLIISAYE | AGUGCAUCUGCCACCUGUCCCCUUACGGGAACAUUUACG | | | |
| | | ELRSEVELE | GGCCCUACUGCCAGUGUGAUAACUUUUCCUGCGUGCGGC | | | |
| | | VLGDTEGLN | ACAAGGGCCUGCUGUGCGGAGGAAAUGGCGACUGCGACU | | | |
| | | LSFTAICNN | GCGGCGAGUGCGUCUGUCGCAGCGGCUGGACCGGGGAGU | | | |
| | | GTLFQHQKK | ACUGCAACUGCACUACUUCCACUGACAGCUGUGUCAGCG | | | |
| | | CSHMKVGDT | AGGACGGGGUGCUCUGUUCUGGCCGCGGGGACUGCGUCU | | | |
| | | ASFSVTVNI | GCGGCAAGUGCGUGUGCACUAAUCCAGGGGCCUCCGGGC | | | |
| | | PHCERRSRH | CCACCUGCGAGCGGUGUCCCACCUGCGGGGACCCUUGCA | | | |
| | | IIIKPVGLG | ACAGCAAGAGGUCCUGCAUCGAGUGCCACCUGUCCGCCG | | | |
| | | DALELLVSP | CCGGACAGGCACGCGAGGAGUGCGUCGAUAAGUGUAAGC | | | |
| | | ECNCDCQKE | UCGCCGGAGCUACAAUUAGCGAGGAGGAGGACUUCUCCA | | | |
| | | VEVNSSKCH | AGGACGGGAGCGUGAGCUGCUCCCUCCAGGGAGAGAACG | | | |
| | | HGNGSFQCG | AGUGCCUGAUCACUUUCCUCAUCACCACUGAUAACGAGG | | | |
| | | VCACHPGHM | GAAAGACAAUCAUUCACUCUAUCAACGAGAAGGAUUGUC | | | |
| | | GPRCECGED | CCAAGCCCCCAAACAUUCCCAUGAUCAUGCUGGGAGUGU | | | |
| | | MLSTDSCKE | CCCUGGCAAUCCUGCUGAUCGGAGUCGUGCUGCUCUGCA | | | |
| | | APDHPSCSG | UCUGGAAGCUGCUCGUCUCCUUCCACGACCGCAAGGAGG | | | |
| | | RGDCYCGQC | UCGCAAAGUUUGAGGCCGAGCGGUCUAAGGCCAAGUGGC | | | |
| | | ICHLSPYGN | AGACAGGGACCAAUCCUCUCUACCGCGGGUCUACUUCUA | | | |
| | | IYGPYCQCD | CCUUCAAGAACGUGACUUACAAGCACAGGGAGAAGCAGA | | | |
| | | NFSCVRHKG | AGGUGGACCUCUCCACCGAUUGCGGGAAGCCCAUCCCCA | | | |
| | | LLCGGNGDC | AUCCCCUGCUGGGCCUGGACAGCACC | | | |
| | | DCGECVCRS | | | | |
| | | GWTGEYCNC | | | | |
| | | TTSTDSCVS | | | | |
| | | EDGVLCSGR | | | | |
| | | GDCVCGKCV | | | | |
| | | CTNPGASGP | | | | |
| | | TCERCPTCG | | | | |
| | | DPCNSKRSC | | | | |
| | | IECHLSAAG | | | | |
| | | QAREECVDK | | | | |
| | | CKLAGATIS | | | | |
| | | EEEDFSKDG | | | | |
| | | SVSCSLQGE | | | | |
| | | NECLITFLI | | | | |
| | | TTDNEGKTI | | | | |
| | | IHSINEKDC | | | | |
| | | PKPPNIPMI | | | | |
| | | MLGVSLAIL | | | | |
| | | LIGVVLLCI | | | | |
| | | WKLLVSFHD | | | | |
| | | RKEVAKFEA | | | | |
| | | ERSKAKWQT | | | | |
| | | GTNPLYRGS | | | | |
| | | TSTFKNVTY | | | | |
| | | KHREKQKVD | | | | |
| | | LSTDCGKPI | | | | |
| | | PNPLLGLDS | | | | |
| | | T | | | | |
| | | 1 | 6 | 50 | 143 | 166 |
| Human | ITB6 | MGIELLCLF | AUGGGUAUCGAGCUGCUGUGUCUGUUCUUUCUGUUUCUGG | GGAAAUCG | UAAGCCCC | SEQ ID |
| Var- | G5 | FLFLGRNDH | GCCGCAACGACCACGUCCAGGGCGGCUGCGCCCUGGGCG | CAAAAUUU | UCCGGGGG | NO: 166 |
| iant | Cap II-b | VQGGCALGG | GGGCCGAGACCUGCGAGGACUGCCUGCUCAUCGGGCCAC | GCUCUUCG | CCUCGGUG | consists |
| 1.7 | Poly A | AETCEDCLL | AGUGUGCCUGGUGUGCACAGGAGAACUUCACCCACCCCA | CGUUAGAU | GCCUAGCU | from 5′ |
| | Tail: | IGPQCAWCA | GCGGGGUGGGCGAGAGGUGCGACACCCCUGCAAAUCUGC | UUCUUUUA | UCUUGCCC | 3′ |
| | 100 nt | QENFTHPSG | UGGCAAAGGGCUGCCAGCUGAAUUUCAUCGAGAAUCCCG | GUUUUCUC | CUUGGGCC | end: 5′ |
| | (SEQ ID | VGERCDTPA | UCAGCCAGGUGGAGAUUCUCAAGAACAAGCCUCUGAGCG | GCAACUAG | UCCCCCCA | UTR of |
| | NO: 502) | NLLAKGCQL | UCGGACGGCAGAAGAACUCUUCUGACAUCGUCCAGAUCG | CAAGCUUU | GCCCCUCC | SEQ ID |
| | | NFIENPVSQ | CACCUCAGAGCCUGAUUCUGAAGCUCCGCCCAGGCGGAG | UUGUUCUC | UCCCCUUC | NO: 50, |
| | | VEILKNKPL | CUCAGACCCUCCAGGUCCACGUCAGGCAGACUGAGGACU | GCC | CUGCACCC | ORF |
| | | SVGRQKNSS | ACCCCGUGGACCUGUACUACCUGAUGGAUCUGUCCGCCA | | GUACCCCC | sequence |
| | | DIVQIAPQS | GCAUGGACGACGAUCUGAACACCAUUAAGGAGCUGGGCA | | CAAACACC | of SEQ |
| | | LILKLRPGG | GCCGGCUCUCUAAGGAGAUGUCCAAGCUCACCAGCAACU | | AUUGUCAC | ID NO: |
| | | AQTLQVHVR | UCAGGCUGGGAUUCGGCAGCUUUGUCGAGAAGCCUGUGU | | ACUCCAGU | 6, and |
| | | QTEDYPVDL | CUCCUUUCGUGAAGACCACACCAGAGGAGAUCGCAAACC | | GGUCUUUG | 3′ UTR |
| | | YYLMDLSAS | CCUGUAGCAGCAUCCCCUACUUCUGCCUGCCUACAUUCG | | AAUAAAGU | sequence |
| | | MDDDLNTIK | GGUUCAAGCACAUUCUGCCUCUGACCAACGACGCAGAGC | | CUGAGUGG | of SEQ |
| | | ELGSRLSKE | GCUUUAACGAGAUCGUGAAGAAUCAGAAGAUCAGCGCCA | | GCGGC | ID NO: |
| | | MSKLTSNFR | ACAUUGAUACUCCUGAGGGCGGCUUCGACGCCAUCAUGC | | | 143. |
| | | LGFGSFVEK | AGGCUGCCGUCUGCAAGGAGAAGAUCGGGUGGAGGAACG | | | |
| | | PVSPFVKTT | ACAGCCUCCACCUGCUCGUGUUCGUGAGCGACGCCGACA | | | |
| | | PEEIANPCS | GCCACUUUGGGAUGGACUCCAAGCUGGCCGGCAUCGUGA | | | |
| | | SIPYFCLPT | UCCCCAACGACGGGCUGUGUCACCUCGAUUCCAAGAACG | | | |
| | | FGFKHILPL | AGUACAGCAUGAGCACCGUGCUGGAGUACCCCACCAUUG | | | |
| | | TNDAERFNE | GGCAGCUCAUUGAUAAGCUCGUGCAGAACAACGUCCUGC | | | |
| | | IVKNQKISA | UGAUCUUUGCAGUGACACAGGAGCAGGUGCACCUGUACG | | | |
| | | NIDTPEGGF | AGAAUUACGCAAAGCUCAUCCCCGGAGCCACUGUGGGCC | | | |
| | | DAIMQAAVC | UCCUGCAGAAGGACUCCGGGAACAUCCUCCAGCUCAUCA | | | |
| | | KEKIGWRND | UCUCCGCCUACGAGGAGCUGAGGAGCGAGGUGGAGCUCG | | | |
| | | SLHLLVFVS | AGGUCCUCGGGGACACCGAGGGCCUCAACCUGAGCUUUA | | | |
| | | DADSHFGMD | CCGCCAUCUGUAACAACGGAACUCUCUUCCAGCACCAGA | | | |
| | | SKLAGIVIP | AGAAGUGCUCUCACAUGAAGGUGGGCGACACCGCCUCCU | | | |
| | | NDGLCHLDS | UCAGCGUGACCGUGAACAUCCCUCACUGUGAGCGGCGGA | | | |
| | | KNEYSMSTV | GCCGCCACAUCAUCAUCAAGCCCGUGGGGCUCGGGGACG | | | |
| | | LEYPTIGQL | CCCUGGAGCUCCUGGUGUCCCCUGAGUGUAACUGCGACU | | | |
| | | IDKLVQNNV | GCCAGAAGGAGGUCGAGGUGAACAGCUCUAAGUGCCACC | | | |
| | | LLIFAVTQE | ACGGCAACGGGAGCUUCCAGUGCGGGGUGUGCGCAUGCC | | | |
| | | QVHLYENYA | ACCCCGGCCACAUGGGGCCUCGCUGCGAGUGCGGCGAGG | | | |
| | | KLIPGATVG | ACAUGCUGUCUACCGACAGCUGCAAGGAGGCCCCUGACC | | | |
| | | LLQKDSGNI | ACCCUAGCUGCUCUGGCCGCGGAGACUGCUACUGCGGCC | | | |
| | | LQLIISAYE | AGUGCAUCUGCCACCUGUCCCCUUACGGGAACAUUUACG | | | |
| | | ELRSEVELE | GGCCCUACUGCCAGUGUGAUAACUUUUCCUGCGUGCGGC | | | |
| | | VLGDTEGLN | ACAAGGGCCUGCUGUGCGGAGGAAAUGGCGACUGCGACU | | | |
| | | LSFTAICNN | GCGGCGAGUGCGUCUGUCGCAGCGGCUGGACCGGGGAGU | | | |
| | | GTLFQHQKK | ACUGCAACUGCACUACUUCCACUGACAGCUGUGUCAGCG | | | |
| | | CSHMKVGDT | AGGACGGGGUGCUCUGUUCUGGCCGCGGGGACUGCGUCU | | | |
| | | ASFSVTVNI | GCGGCAAGUGCGUGUGCACUAAUCCAGGGGCCUCCGGGC | | | |
| | | PHCERRSRH | CCACCUGCGAGCGGUGUCCCACCUGCGGGGACCCUUGCA | | | |
| | | IIIKPVGLG | ACAGCAAGAGGUCCUGCAUCGAGUGCCACCUGUCCGCCG | | | |
| | | DALELLVSP | CCGGACAGGCACGCGAGGAGUGCGUCGAUAAGUGUAAGC | | | |
| | | ECNCDCQKE | UCGCCGGAGCUACAAUUAGCGAGGAGGAGGACUUCUCCA | | | |
| | | VEVNSSKCH | AGGACGGGAGCGUGAGCUGCUCCCUCCAGGGAGAGAACG | | | |
| | | HGNGSFQCG | AGUGCCUGAUCACUUUCCUCAUCACCACUGAUAACGAGG | | | |
| | | VCACHPGHM | GAAAGACAAUCAUUCACUCUAUCAACGAGAAGGAUUGUC | | | |
| | | GPRCECGED | CCAAGCCCCCAAACAUUCCCAUGAUCAUGCUGGGAGUGU | | | |
| | | MLSTDSCKE | CCCUGGCAAUCCUGCUGAUCGGAGUCGUGCUGCUCUGCA | | | |
| | | APDHPSCSG | UCUGGAAGCUGCUCGUCUCCUUCCACGACCGCAAGGAGG | | | |
| | | RGDCYCGQC | UCGCAAAGUUUGAGGCCGAGCGGUCUAAGGCCAAGUGGC | | | |
| | | ICHLSPYGN | AGACAGGGACCAAUCCUCUCUACCGCGGGUCUACUUCUA | | | |
| | | IYGPYCQCD | CCUUCAAGAACGUGACUUACAAGCACAGGGAGAAGCAGA | | | |
| | | NFSCVRHKG | AGGUGGACCUCUCCACCGAUUGCGGGAAGCCCAUCCCCA | | | |
| | | LLCGGNGDC | AUCCCCUGCUGGGCCUGGACAGCACC | | | |
| | | DCGECVCRS | | | | |
| | | GWTGEYCNC | | | | |
| | | TTSTDSCVS | | | | |
| | | EDGVLCSGR | | | | |
| | | GDCVCGKCV | | | | |
| | | CTNPGASGP | | | | |
| | | TCERCPTCG | | | | |
| | | DPCNSKRSC | | | | |
| | | IECHLSAAG | | | | |
| | | QAREECVDK | | | | |
| | | CKLAGATIS | | | | |
| | | EEEDFSKDG | | | | |
| | | SVSCSLQGE | | | | |
| | | NECLITFLI | | | | |
| | | TTDNEGKTI | | | | |
| | | IHSINEKDC | | | | |
| | | PKPPNIPMI | | | | |
| | | MLGVSLAIL | | | | |
| | | LIGVVLLCI | | | | |
| | | WKLLVSFHD | | | | |
| | | RKEVAKFEA | | | | |
| | | ERSKAKWQT | | | | |
| | | GTNPLYRGS | | | | |
| | | TSTFKNVTY | | | | |
| | | KHREKQKVD | | | | |
| | | LSTDCGKPI | | | | |
| | | PNPLLGLDS | | | | |
| | | T | | | | |
| | | 1 | 6 | 50 | 145 | 167 |
| Human | ITB6 | MGIELLCLF | AUGGGUAUCGAGCUGCUGUGUCUGUUCUUUCUGUUUCUGG | GGAAAUCG | UAAAGCUC | SEQ ID |
| Var- | G5 | FLFLGRNDH | GCCGCAACGACCACGUCCAGGGCGGCUGCGCCCUGGGCG | CAAAAUUU | CCCGGGGG | NO: 167 |
| iant | Cap II-b | VQGGCALGG | GGGCCGAGACCUGCGAGGACUGCCUGCUCAUCGGGCCAC | GCUCUUCG | CCUCGGUG | consists |
| 1.8 | Poly A | AETCEDCLL | AGUGUGCCUGGUGUGCACAGGAGAACUUCACCCACCCCA | CGUUAGAU | GCCUAGCU | from 5′ |
| | Tail: | IGPQCAWCA | GCGGGGUGGGCGAGAGGUGCGACACCCCUGCAAAUCUGC | UUCUUUUA | UCUUGCCC | to 3′ |
| | 100 nt | QENFTHPSG | UGGCAAAGGGCUGCCAGCUGAAUUUCAUCGAGAAUCCCG | GUUUUCUC | CUUGGGCC | end: 5′ |
| | (SEQ ID | VGERCDTPA | UCAGCCAGGUGGAGAUUCUCAAGAACAAGCCUCUGAGCG | GCAACUAG | UCCCCCCA | UTR of |
| | NO: 502) | NLLAKGCQL | UCGGACGGCAGAAGAACUCUUCUGACAUCGUCCAGAUCG | CAAGCUUU | GCCCCUCC | SEQ ID |
| | | NFIENPVSQ | CACCUCAGAGCCUGAUUCUGAAGCUCCGCCCAGGCGGAG | UUGUUCUC | UCCCCUUC | NO: 50, |
| | | VEILKNKPL | CUCAGACCCUCCAGGUCCACGUCAGGCAGACUGAGGACU | GCC | CUGCACCC | ORF |
| | | SVGROKNSS | ACCCCGUGGACCUGUACUACCUGAUGGAUCUGUCCGCCA | | GUACCCCC | sequence |
| | | DIVQIAPQS | GCAUGGACGACGAUCUGAACACCAUUAAGGAGCUGGGCA | | CAAACACC | of SEQ |
| | | LILKLRPGG | GCCGGCUCUCUAAGGAGAUGUCCAAGCUCACCAGCAACU | | AUUGUCAC | ID NO: |
| | | AQTLQVHVR | UCAGGCUGGGAUUCGGCAGCUUUGUCGAGAAGCCUGUGU | | ACUCCAGU | 6, and |
| | | QTEDYPVDL | CUCCUUUCGUGAAGACCACACCAGAGGAGAUCGCAAACC | | GGUCUUUG | 3′ UTR |
| | | YYLMDLSAS | CCUGUAGCAGCAUCCCCUACUUCUGCCUGCCUACAUUCG | | AAUAAAGU | sequence |
| | | MDDDLNTIK | GGUUCAAGCACAUUCUGCCUCUGACCAACGACGCAGAGC | | CUGAGUGG | of SEQ |
| | | ELGSRLSKE | GCUUUAACGAGAUCGUGAAGAAUCAGAAGAUCAGCGCCA | | GCGGC | ID NO: |
| | | MSKLTSNFR | ACAUUGAUACUCCUGAGGGGGCUUCGACGCCAUCAUGC | | | 145. |
| | | LGFGSFVEK | AGGCUGCCGUCUGCAAGGAGAAGAUCGGGUGGAGGAACG | | | |
| | | PVSPFVKTT | ACAGCCUCCACCUGCUCGUGUUCGUGAGCGACGCCGACA | | | |
| | | PEEIANPCS | GCCACUUUGGGAUGGACUCCAAGCUGGCCGGCAUCGUGA | | | |
| | | SIPYFCLPT | UCCCCAACGACGGGCUGUGUCACCUCGAUUCCAAGAACG | | | |
| | | FGFKHILPL | AGUACAGCAUGAGCACCGUGCUGGAGUACCCCACCAUUG | | | |
| | | TNDAERFNE | GGCAGCUCAUUGAUAAGCUCGUGCAGAACAACGUCCUGC | | | |
| | | IVKNQKISA | UGAUCUUUGCAGUGACACAGGAGCAGGUGCACCUGUACG | | | |
| | | NIDTPEGGF | AGAAUUACGCAAAGCUCAUCCCCGGAGCCACUGUGGGCC | | | |
| | | DAIMQAAVC | UCCUGCAGAAGGACUCCGGGAACAUCCUCCAGCUCAUCA | | | |
| | | KEKIGWRND | UCUCCGCCUACGAGGAGCUGAGGAGCGAGGUGGAGCUCG | | | |
| | | SLHLLVFVS | AGGUCCUCGGGGACACCGAGGGCCUCAACCUGAGCUUUA | | | |
| | | DADSHFGMD | CCGCCAUCUGUAACAACGGAACUCUCUUCCAGCACCAGA | | | |
| | | SKLAGIVIP | AGAAGUGCUCUCACAUGAAGGUGGGCGACACCGCCUCCU | | | |
| | | NDGLCHLDS | UCAGCGUGACCGUGAACAUCCCUCACUGUGAGCGGCGGA | | | |
| | | KNEYSMSTV | GCCGCCACAUCAUCAUCAAGCCCGUGGGGCUCGGGGACG | | | |
| | | LEYPTIGQL | CCCUGGAGCUCCUGGUGUCCCCUGAGUGUAACUGCGACU | | | |
| | | IDKLVQNNV | GCCAGAAGGAGGUCGAGGUGAACAGCUCUAAGUGCCACC | | | |
| | | LLIFAVTQE | ACGGCAACGGGAGCUUCCAGUGCGGGGUGUGCGCAUGCC | | | |
| | | QVHLYENYA | ACCCCGGCCACAUGGGGCCUCGCUGCGAGUGCGGCGAGG | | | |
| | | KLIPGATVG | ACAUGCUGUCUACCGACAGCUGCAAGGAGGCCCCUGACC | | | |
| | | LLQKDSGNI | ACCCUAGCUGCUCUGGCCGCGGAGACUGCUACUGCGGCC | | | |
| | | LQLIISAYE | AGUGCAUCUGCCACCUGUCCCCUUACGGGAACAUUUACG | | | |
| | | ELRSEVELE | GGCCCUACUGCCAGUGUGAUAACUUUUCCUGCGUGCGGC | | | |
| | | VLGDTEGLN | ACAAGGGCCUGCUGUGCGGAGGAAAUGGCGACUGCGACU | | | |
| | | LSFTAICNN | GCGGCGAGUGCGUCUGUCGCAGCGGCUGGACCGGGGAGU | | | |
| | | GTLFQHQKK | ACUGCAACUGCACUACUUCCACUGACAGCUGUGUCAGCG | | | |
| | | CSHMKVGDT | AGGACGGGGUGCUCUGUUCUGGCCGCGGGGACUGCGUCU | | | |
| | | ASFSVTVNI | GCGGCAAGUGCGUGUGCACUAAUCCAGGGGCCUCCGGGC | | | |
| | | PHCERRSRH | CCACCUGCGAGCGGUGUCCCACCUGCGGGGACCCUUGCA | | | |
| | | IIIKPVGLG | ACAGCAAGAGGUCCUGCAUCGAGUGCCACCUGUCCGCCG | | | |
| | | DALELLVSP | CCGGACAGGCACGCGAGGAGUGCGUCGAUAAGUGUAAGC | | | |
| | | ECNCDCQKE | UCGCCGGAGCUACAAUUAGCGAGGAGGAGGACUUCUCCA | | | |
| | | VEVNSSKCH | AGGACGGGAGCGUGAGCUGCUCCCUCCAGGGAGAGAACG | | | |
| | | HGNGSFQCG | AGUGCCUGAUCACUUUCCUCAUCACCACUGAUAACGAGG | | | |
| | | VCACHPGHM | GAAAGACAAUCAUUCACUCUAUCAACGAGAAGGAUUGUC | | | |
| | | GPRCECGED | CCAAGCCCCCAAACAUUCCCAUGAUCAUGCUGGGAGUGU | | | |
| | | MLSTDSCKE | CCCUGGCAAUCCUGCUGAUCGGAGUCGUGCUGCUCUGCA | | | |
| | | APDHPSCSG | UCUGGAAGCUGCUCGUCUCCUUCCACGACCGCAAGGAGG | | | |
| | | RGDCYCGQC | UCGCAAAGUUUGAGGCCGAGCGGUCUAAGGCCAAGUGGC | | | |
| | | ICHLSPYGN | AGACAGGGACCAAUCCUCUCUACCGCGGGUCUACUUCUA | | | |
| | | IYGPYCQCD | CCUUCAAGAACGUGACUUACAAGCACAGGGAGAAGCAGA | | | |
| | | NFSCVRHKG | AGGUGGACCUCUCCACCGAUUGCGGGAAGCCCAUCCCCA | | | |
| | | LLCGGNGDC | AUCCCCUGCUGGGCCUGGACAGCACC | | | |
| | | DCGECVCRS | | | | |
| | | GWTGEYCNC | | | | |
| | | TTSTDSCVS | | | | |
| | | EDGVLCSGR | | | | |
| | | GDCVCGKCV | | | | |
| | | CTNPGASGP | | | | |
| | | TCERCPTCG | | | | |
| | | DPCNSKRSC | | | | |
| | | IECHLSAAG | | | | |
| | | QAREECVDK | | | | |
| | | CKLAGATIS | | | | |
| | | EEEDFSKDG | | | | |
| | | SVSCSLQGE | | | | |
| | | NECLITFLI | | | | |
| | | TTDNEGKTI | | | | |
| | | IHSINEKDC | | | | |
| | | PKPPNIPMI | | | | |
| | | MLGVSLAIL | | | | |
| | | LIGVVLLCI | | | | |
| | | WKLLVSFHD | | | | |
| | | RKEVAKFEA | | | | |
| | | ERSKAKWQT | | | | |
| | | GTNPLYRGS | | | | |
| | | TSTFKNVTY | | | | |
| | | KHREKQKVD | | | | |
| | | LSTDCGKPI | | | | |
| | | PNPLLGLDS | | | | |
| | | T | | | | |
| | | 1 | 6 | 50 | 143 | 168 |
| Human | ITB6 | MGIELLCLF | AUGGGUAUCGAGCUGCUGUGUCUGUUCUUUCUGUUUCUGG | GGAAAUCG | UAAGCCCC | SEQ ID |
| Var- | G5 | FLFLGRNDH | GCCGCAACGACCACGUCCAGGGCGGCUGCGCCCUGGGCG | CAAAAUUU | UCCGGGGG | NO: 168 |
| iant | Cap II-b | VQGGCALGG | GGGCCGAGACCUGCGAGGACUGCCUGCUCAUCGGGCCAC | GCUCUUCG | CCUCGGUG | consists |
| 1.9 | Poly A | AETCEDCLL | AGUGUGCCUGGUGUGCACAGGAGAACUUCACCCACCCCA | CGUUAGAU | GCCUAGCU | from 5′ |
| | Tail: | IGPQCAWCA | GCGGGGUGGGCGAGAGGUGCGACACCCCUGCAAAUCUGC | UUCUUUUA | UCUUGCCC | to 3′ |
| | 100 nt | QENFTHPSG | UGGCAAAGGGCUGCCAGCUGAAUUUCAUCGAGAAUCCCG | GUUUUCUC | CUUGGGCC | end: 5′ |
| | (SEQ ID | VGERCDTPA | UCAGCCAGGUGGAGAUUCUCAAGAACAAGCCUCUGAGCG | GCAACUAG | UCCCCCCA | UTR of |
| | NO: 502) | NLLAKGCQL | UCGGACGGCAGAAGAACUCUUCUGACAUCGUCCAGAUCG | CAAGCUUU | GCCCCUCC | SEQ ID |
| | | NFIENPVSQ | CACCUCAGAGCCUGAUUCUGAAGCUCCGCCCAGGCGGAG | UUGUUCUC | UCCCCUUC | NO: 50, |
| | | VEILKNKPL | CUCAGACCCUCCAGGUCCACGUCAGGCAGACUGAGGACU | GCC | CUGCACCC | ORF |
| | | SVGRQKNSS | ACCCCGUGGACCUGUACUACCUGAUGGAUCUGUCCGCCA | | GUACCCCC | sequence |
| | | DIVQIAPQS | GCAUGGACGACGAUCUGAACACCAUUAAGGAGCUGGGCA | | CAAACACC | of SEQ |
| | | LILKLRPGG | GCCGGCUCUCUAAGGAGAUGUCCAAGCUCACCAGCAACU | | AUUGUCAC | ID NO: |
| | | AQTLQVHVR | UCAGGCUGGGAUUCGGCAGCUUUGUCGAGAAGCCUGUGU | | ACUCCAGU | 6, and |
| | | QTEDYPVDL | CUCCUUUCGUGAAGACCACACCAGAGGAGAUCGCAAACC | | GGUCUUUG | 3′ UTR |
| | | YYLMDLSAS | CCUGUAGCAGCAUCCCCUACUUCUGCCUGCCUACAUUCG | | AAUAAAGU | sequence |
| | | MDDDLNTIK | GGUUCAAGCACAUUCUGCCUCUGACCAACGACGCAGAGC | | CUGAGUGG | of SEQ |
| | | ELGSRLSKE | GCUUUAACGAGAUCGUGAAGAAUCAGAAGAUCAGCGCCA | | GCGGC | ID NO: |
| | | MSKLTSNFR | ACAUUGAUACUCCUGAGGGCGGCUUCGACGCCAUCAUGC | | | 143. |
| | | LGFGSFVEK | AGGCUGCCGUCUGCAAGGAGAAGAUCGGGUGGAGGAACG | | | |
| | | PVSPFVKTT | ACAGCCUCCACCUGCUCGUGUUCGUGAGCGACGCCGACA | | | |
| | | PEEIANPCS | GCCACUUUGGGAUGGACUCCAAGCUGGCCGGCAUCGUGA | | | |
| | | SIPYFCLPT | UCCCCAACGACGGGCUGUGUCACCUCGAUUCCAAGAACG | | | |
| | | FGFKHILPL | AGUACAGCAUGAGCACCGUGCUGGAGUACCCCACCAUUG | | | |
| | | TNDAERFNE | GGCAGCUCAUUGAUAAGCUCGUGCAGAACAACGUCCUGC | | | |
| | | IVKNQKISA | UGAUCUUUGCAGUGACACAGGAGCAGGUGCACCUGUACG | | | |
| | | NIDTPEGGF | AGAAUUACGCAAAGCUCAUCCCCGGAGCCACUGUGGGCC | | | |
| | | DAIMQAAVC | UCCUGCAGAAGGACUCCGGGAACAUCCUCCAGCUCAUCA | | | |
| | | KEKIGWRND | UCUCCGCCUACGAGGAGCUGAGGAGCGAGGUGGAGCUCG | | | |
| | | SLHLLVFVS | AGGUCCUCGGGGACACCGAGGGCCUCAACCUGAGCUUUA | | | |
| | | DADSHFGMD | CCGCCAUCUGUAACAACGGAACUCUCUUCCAGCACCAGA | | | |
| | | SKLAGIVIP | AGAAGUGCUCUCACAUGAAGGUGGGCGACACCGCCUCCU | | | |
| | | NDGLCHLDS | UCAGCGUGACCGUGAACAUCCCUCACUGUGAGCGGCGGA | | | |
| | | KNEYSMSTV | GCCGCCACAUCAUCAUCAAGCCCGUGGGGCUCGGGGACG | | | |
| | | LEYPTIGQL | CCCUGGAGCUCCUGGUGUCCCCUGAGUGUAACUGCGACU | | | |
| | | IDKLVQNNV | GCCAGAAGGAGGUCGAGGUGAACAGCUCUAAGUGCCACC | | | |
| | | LLIFAVTQE | ACGGCAACGGGAGCUUCCAGUGCGGGGUGUGCGCAUGCC | | | |
| | | QVHLYENYA | ACCCCGGCCACAUGGGGCCUCGCUGCGAGUGCGGCGAGG | | | |
| | | KLIPGATVG | ACAUGCUGUCUACCGACAGCUGCAAGGAGGCCCCUGACC | | | |
| | | LLQKDSGNI | ACCCUAGCUGCUCUGGCCGCGGAGACUGCUACUGCGGCC | | | |
| | | LQLIISAYE | AGUGCAUCUGCCACCUGUCCCCUUACGGGAACAUUUACG | | | |
| | | ELRSEVELE | GGCCCUACUGCCAGUGUGAUAACUUUUCCUGCGUGCGGC | | | |
| | | VLGDTEGLN | ACAAGGGCCUGCUGUGCGGAGGAAAUGGCGACUGCGACU | | | |
| | | LSFTAICNN | GCGGCGAGUGCGUCUGUCGCAGCGGCUGGACCGGGGAGU | | | |
| | | GTLFQHQKK | ACUGCAACUGCACUACUUCCACUGACAGCUGUGUCAGCG | | | |
| | | CSHMKVGDT | AGGACGGGGUGCUCUGUUCUGGCCGCGGGGACUGCGUCU | | | |
| | | ASFSVTVNI | GCGGCAAGUGCGUGUGCACUAAUCCAGGGGCCUCCGGGC | | | |
| | | PHCERRSRH | CCACCUGCGAGCGGUGUCCCACCUGCGGGGACCCUUGCA | | | |
| | | IIIKPVGLG | ACAGCAAGAGGUCCUGCAUCGAGUGCCACCUGUCCGCCG | | | |
| | | DALELLVSP | CCGGACAGGCACGCGAGGAGUGCGUCGAUAAGUGUAAGC | | | |
| | | ECNCDCQKE | UCGCCGGAGCUACAAUUAGCGAGGAGGAGGACUUCUCCA | | | |
| | | VEVNSSKCH | AGGACGGGAGCGUGAGCUGCUCCCUCCAGGGAGAGAACG | | | |
| | | HGNGSFQCG | AGUGCCUGAUCACUUUCCUCAUCACCACUGAUAACGAGG | | | |
| | | VCACHPGHM | GAAAGACAAUCAUUCACUCUAUCAACGAGAAGGAUUGUC | | | |
| | | GPRCECGED | CCAAGCCCCCAAACAUUCCCAUGAUCAUGCUGGGAGUGU | | | |
| | | MLSTDSCKE | CCCUGGCAAUCCUGCUGAUCGGAGUCGUGCUGCUCUGCA | | | |
| | | APDHPSCSG | UCUGGAAGCUGCUCGUCUCCUUCCACGACCGCAAGGAGG | | | |
| | | RGDCYCGQC | UCGCAAAGUUUGAGGCCGAGCGGUCUAAGGCCAAGUGGC | | | |
| | | ICHLSPYGN | AGACAGGGACCAAUCCUCUCUACCGCGGGUCUACUUCUA | | | |
| | | IYGPYCQCD | CCUUCAAGAACGUGACUUACAAGCACAGGGAGAAGCAGA | | | |
| | | NFSCVRHKG | AGGUGGACCUCUCCACCGAUUGCGGGAAGCCCAUCCCCA | | | |
| | | LLCGGNGDC | AUCCCCUGCUGGGCCUGGACAGCACC | | | |
| | | DCGECVCRS | | | | |
| | | GWTGEYCNC | | | | |
| | | TTSTDSCVS | | | | |
| | | EDGVLCSGR | | | | |
| | | GDCVCGKCV | | | | |
| | | CTNPGASGP | | | | |
| | | TCERCPTCG | | | | |
| | | DPCNSKRSC | | | | |
| | | IECHLSAAG | | | | |
| | | QAREECVDK | | | | |
| | | CKLAGATIS | | | | |
| | | EEEDFSKDG | | | | |
| | | SVSCSLQGE | | | | |
| | | NECLITFLI | | | | |
| | | TTDNEGKTI | | | | |
| | | IHSINEKDC | | | | |
| | | PKPPNIPMI | | | | |
| | | MLGVSLAIL | | | | |
| | | LIGVVLLCI | | | | |
| | | WKLLVSFHD | | | | |
| | | RKEVAKFEA | | | | |
| | | ERSKAKWQT | | | | |
| | | GTNPLYRGS | | | | |
| | | TSTFKNVTY | | | | |
| | | KHREKQKVD | | | | |
| | | LSTDCGKPI | | | | |
| | | PNPLLGLDS | | | | |
| | | T | | | | |
| | | 1 | 5 | 50 | 145 | 169 |
| Human | ITB6 | MGIELLCLF | AUGGGGAUCGAGCUGCUGUGCCUGUUCUUCCUGUUCCUGG | GGAAAUCG | UAAAGCUC | SEQ ID |
| Var- | G5 | FLFLGRNDH | GACGGAACGACCACGUGCAGGGUGGCUGCGCCCUUGGUG | CAAAAUUU | CCCGGGGG | NO: 169 |
| iant | Cap II-b | VQGGCALGG | GGGCAGAGACCUGCGAGGACUGCCUGCUCAUCGGCCCAC | GCUCUUCG | CCUCGGUG | consists |
| 1.10 | Poly A | AETCEDCLL | AGUGCGCCUGGUGCGCUCAGGAGAACUUCACCCACCCCA | CGUUAGAU | GCCUAGCU | from 5′ |
| | Tail: | IGPQCAWCA | GCGGAGUGGGCGAGAGGUGCGACACCCCGGCCAACCUGC | UUCUUUUA | UCUUGCCC | to 3′ |
| | 100 nt | QENFTHPSG | UGGCCAAGGGGUGCCAGCUGAACUUCAUCGAGAACCCCG | GUUUUCUC | CUUGGGCC | end: 5′ |
| | (SEQ ID | VGERCDTPA | UCUCUCAGGUGGAGAUCCUGAAGAACAAGCCCCUCAGCG | GCAACUAG | UCCCCCCA | UTR of |
| | NO: 502) | NLLAKGCQL | UUGGGCGGCAGAAGAACAGCUCUGACAUCGUGCAGAUCG | CAAGCUUU | GCCCCUCC | SEQ ID |
| | | NFIENPVSQ | CGCCCCAGAGCCUGAUCCUGAAACUACGGCCUGGCGGUG | UUGUUCUC | UCCCCUUC | NO: 50, |
| | | VEILKNKPL | CGCAAACCCUGCAGGUCCACGUGCGGCAGACCGAGGACU | GCC | CUGCACCC | ORF |
| | | SVGRQKNSS | ACCCUGUGGACCUGUACUACCUGAUGGACCUCUCCGCCA | | GUACCCCC | sequence |
| | | DIVQIAPQS | GCAUGGACGACGAUCUGAACACCAUCAAGGAGCUGGGCA | | CAAACACC | of SEQ |
| | | LILKLRPGG | GCCGCCUGAGCAAGGAGAUGUCCAAGCUGACCUCCAACU | | AUUGUCAC | ID NO: |
| | | AQTLQVHVR | UCCGCCUGGGGUUCGGAUCCUUCGUGGAGAAGCCCGUGA | | ACUCCAGU | 5, and |
| | | QTEDYPVDL | GCCCCUUCGUGAAGACCACCCCUGAGGAGAUCGCCAACC | | GGUCUUUG | 3′ UTR |
| | | YYLMDLSAS | CCUGCAGCAGCAUCCCUUACUUCUGCCUGCCCACCUUCG | | AAUAAAGU | sequence |
| | | MDDDLNTIK | GCUUCAAGCACAUCCUGCCACUGACCAACGACGCCGAGC | | CUGAGUGG | of SEQ |
| | | ELGSRLSKE | GGUUCAACGAGAUCGUGAAGAACCAGAAGAUCAGCGCCA | | GCGGC | ID NO: |
| | | MSKLTSNFR | ACAUCGACACCCCGGAGGGUGGGUUCGACGCUAUCAUGC | | | 145. |
| | | LGFGSFVEK | AGGCCGCCGUGUGCAAGGAGAAGAUCGGCUGGCGCAACG | | | |
| | | PVSPFVKTT | ACAGCCUGCACCUGCUGGUGUUCGUGUCCGACGCCGACU | | | |
| | | PEEIANPCS | CCCACUUCGGCAUGGACAGCAAGCUGGCCGGUAUCGUGA | | | |
| | | SIPYFCLPT | UCCCUAACGACGGCCUGUGCCACCUGGACAGCAAGAACG | | | |
| | | FGFKHILPL | AGUACAGCAUGAGCACCGUGCUGGAGUACCCCACCAUCG | | | |
| | | TNDAERFNE | GCCAGCUGAUCGACAAGCUGGUGCAGAACAACGUGCUGC | | | |
| | | IVKNQKISA | UGAUCUUCGCCGUGACCCAGGAGCAGGUGCACCUCUACG | | | |
| | | NIDTPEGGF | AGAACUACGCCAAGCUGAUUCCAGGCGCCACCGUCGGUC | | | |
| | | DAIMQAAVC | UGCUGCAGAAGGACAGCGGCAACAUCCUGCAGCUGAUCA | | | |
| | | KEKIGWRND | UCUCCGCCUACGAGGAGCUGAGGAGCGAGGUGGAGCUGG | | | |
| | | SLHLLVFVS | AGGUGCUCGGGGACACCGAGGGCCUGAACCUGUCCUUCA | | | |
| | | DADSHFGMD | CCGCCAUCUGCAACAACGGGACCCUCUUCCAGCACCAGA | | | |
| | | SKLAGIVIP | AGAAGUGCAGCCACAUGAAGGUGGGCGACACCGCCAGCU | | | |
| | | NDGLCHLDS | UCAGCGUCACCGUGAACAUACCUCACUGUGAGCGGCGGA | | | |
| | | KNEYSMSTV | GCAGGCACAUCAUCAUCAAGCCCGUGGGCCUGGGAGACG | | | |
| | | LEYPTIGQL | CCCUGGAGCUGCUGGUGUCUCCCGAGUGCAACUGCGACU | | | |
| | | IDKLVQNNV | GCCAGAAGGAGGUGGAGGUGAACUCUAGCAAGUGCCACC | | | |
| | | LLIFAVTQE | ACGGCAACGGGAGUUUCCAGUGUGGCGUGUGUGCCUGCC | | | |
| | | QVHLYENYA | ACCCCGGUCACAUGGGACCCCGGUGUGAGUGCGGGGAGG | | | |
| | | KLIPGATVG | ACAUGCUGAGCACCGACAGCUGCAAGGAGGCCCCAGACC | | | |
| | | LLQKDSGNI | ACCCGAGCUGUUCCGGUCGGGGCGACUGCUACUGCGGCC | | | |
| | | LQLIISAYE | AGUGCAUCUGUCACCUGAGCCCCUACGGCAACAUCUACG | | | |
| | | ELRSEVELE | GGCCCUACUGCCAGUGCGACAACUUCUCCUGCGUGCGCC | | | |
| | | VLGDTEGLN | ACAAAGGCCUGCUGUGUGGCGGCAACGGCGACUGCGACU | | | |
| | | LSFTAICNN | GCGGGGAGUGCGUGUGCCGCAGUGGGUGGACCGGCGAGU | | | |
| | | GTLFQHQKK | ACUGCAACUGCACCACCUCCACCGACUCUUGCGUGUCCG | | | |
| | | CSHMKVGDT | AGGACGGGGUGCUGUGUUCCGGGCGCGGAGAUUGCGUGU | | | |
| | | ASFSVTVNI | GCGGGAAGUGCGUGUGCACCAACCCUGGCGCAUCGGGUC | | | |
| | | PHCERRSRH | CUACCUGCGAGAGGUGCCCCACCUGUGGCGACCCCUGCA | | | |
| | | IIIKPVGLG | ACAGCAAGCGCUCUUGCAUCGAGUGCCACCUCUCAGCAG | | | |
| | | DALELLVSP | CAGGGCAGGCUCGGGAGGAGUGCGUGGACAAGUGCAAGC | | | |
| | | ECNCDCQKE | UCGCCGGCGCCACCAUCAGUGAGGAGGAGGACUUCUCCA | | | |
| | | VEVNSSKCH | AGGACGGCAGCGUGUCCUGCUCCCUCCAGGGCGAGAACG | | | |
| | | HGNGSFQCG | AGUGCCUCAUCACCUUCCUGAUCACCACCGACAACGAGG | | | |
| | | VCACHPGHM | GCAAGACCAUCAUCCACUCCAUCAACGAGAAGGACUGCC | | | |
| | | GPRCECGED | CCAAGCCGCCUAACAUCCCCAUGAUCAUGCUGGGCGUGA | | | |
| | | MLSTDSCKE | GCCUGGCCAUCCUGCUGAUCGGCGUGGUGCUGCUGUGCA | | | |
| | | APDHPSCSG | UCUGGAAGCUGCUGGUCUCCUUCCACGACCGCAAGGAGG | | | |
| | | RGDCYCGQC | UGGCCAAGUUCGAGGCCGAGCGCUCUAAGGCCAAGUGGC | | | |
| | | ICHLSPYGN | AGACCGGCACCAACCCUCUGUACCGGGGCUCCACCAGCA | | | |
| | | IYGPYCQCD | CCUUCAAGAACGUGACCUACAAGCACCGCGAGAAGCAGA | | | |
| | | NFSCVRHKG | AGGUGGACCUGUCCACCGACUGUGGCAAGCCCAUCCCCA | | | |
| | | LLCGGNGDC | AUCCCCUGCUGGGGCUGGACUCCACC | | | |
| | | DCGECVCRS | | | | |
| | | GWTGEYCNC | | | | |
| | | TTSTDSCVS | | | | |
| | | EDGVLCSGR | | | | |
| | | GDCVCGKCV | | | | |
| | | CTNPGASGP | | | | |
| | | TCERCPTCG | | | | |
| | | DPCNSKRSC | | | | |
| | | IECHLSAAG | | | | |
| | | QAREECVDK | | | | |
| | | CKLAGATIS | | | | |
| | | EEEDFSKDG | | | | |
| | | SVSCSLQGE | | | | |
| | | NECLITFLI | | | | |
| | | TTDNEGKTI | | | | |
| | | IHSINEKDC | | | | |
| | | PKPPNIPMI | | | | |
| | | MLGVSLAIL | | | | |
| | | LIGVVLLCI | | | | |
| | | WKLLVSFHD | | | | |
| | | RKEVAKFEA | | | | |
| | | ERSKAKWQT | | | | |
| | | GTNPLYRGS | | | | |
| | | TSTFKNVTY | | | | |
| | | KHREKQKVD | | | | |
| | | LSTDCGKPI | | | | |
| | | PNPLLGLDS | | | | |
| | | T | | | | |
| | | 7 | 8 | 50 | 110 | 170 |
| Human | ITB6 | MGIELLCLFF | AUGGGGAUCGAGCUGCUGUGCCUGUUCUUCCUGUUCCUGG | GGAAAUCG | UGAUAAUA | SEQ ID |
| Var- | G5 | LFLGRNDHV | GACGGAACGACCACGUGCAGGGUGGCUGCGCCCUUGGUG | CAAAAUUU | GGCUGGAG | NO: 170 |
| iant | Cap C1 | QGGCALGGA | GGGCAGAGACCUGCGAGGACUGCCUGCUCAUCGGCCCAC | GCUCUUCG | CCUCGGUG | consists |
| 2.1 | Poly A | ETCEDCLLI | AGUGCGCCUGGUGCGCUCAGGAGAACUUCACCCACCCCA | CGUUAGAU | GCCUAGCU | from 5′ |
| | Tail: | GPQCAWCAQ | GCGGAGUGGGCGAGAGGUGCGACACCCCGGCCAACCUGC | UUCUUUUA | UCUUGCCC | to 3′ |
| | 100 nt | ENFTHPSGV | UGGCCAAGGGGUGCCAGCUGAACUUCAUCGAGAACCCCG | GUUUUCUC | CUUGGGCC | end: 5′ |
| | (SEQ ID | GERCDTPAN | UCUCUCAGGUGGAGAUCCUGAAGAACAAGCCCCUCAGCG | GCAACUAG | UCCCCCCA | UTR of |
| | NO: 502) | LLAKGCQLN | UUGGGCGGCAGAAGAACAGCUCUGACAUCGUGCAGAUCG | CAAGCUUU | GCCCCUCC | SEQ ID |
| | | FIENPVSQV | CGCCCCAGAGCCUGAUCCUGAAACUACGGCCUGGCGGUG | UUGUUCUC | UCCCCUUC | NO: 50, |
| | | EILKNKPLS | CGCAAACCCUGCAGGUCCACGUGCGGCAGACCGAGGACU | GCC | CUGCACCC | ORF |
| | | VGRQKNSSD | ACCCUGUGGACCUGUACUACCUGAUGGACCUCUCCGCCA | | GUACCCCC | sequence |
| | | IVQIAPQSL | GCAUGGACGACGAUCUGAACACCAUCAAGGAGCUGGGCA | | CAAACACC | of SEQ |
| | | ILKLRPGGA | GCCGCCUGAGCAAGGAGAUGUCCAAGCUGACCUCCAACU | | AUUGUCAC | ID NO: |
| | | QTLQVHVRQ | UCCGCCUGGGGUUCGGAUCCUUCGUGGAGAAGCCCGUGA | | ACUCCAGU | 8, and |
| | | TEDYPVDLY | GCCCCUUCGUGAAGACCACCCCUGAGGAGAUCGCCAACC | | GGUCUUUG | 3′ UTR |
| | | YLMDLSASM | CCUGCAGCAGCAUCCCUUACUUCUGCCUGCCCACCUUCG | | AAUAAAGU | sequence |
| | | DDDLNTIKE | GCUUCAAGCACAUCCUGCCACUGACCAACGACGCCGAGC | | CUGAGUGG | of SEQ |
| | | LGSRLSKEM | GGUUCAACGAGAUCGUGAAGAACCAGAAGAUCAGCGCCA | | GCGGC | ID NO: |
| | | SKLTSNFRL | ACAUCGACGCCCCGGAGGGUGGGUUCGACGCUAUCAUGC | | | 110. |
| | | GFGSFVEKP | AGGCCGCCGUGUGCAAGGAGAAGAUCGGCUGGCGCAACG | | | |
| | | VSPFVKTTP | ACAGCCUGCACCUGCUGGUGUUCGUGUCCGACGCCGACU | | | |
| | | EEIANPCSS | CCCACUUCGGCAUGGACAGCAAGCUGGCCGGUAUCGUGA | | | |
| | | IPYFCLPTF | UCCCUAACGACGGCCUGUGCCACCUGGACAGCAAGAACG | | | |
| | | GFKHILPLT | AGUACAGCAUGAGCACCGUGCUGGAGUACCCCACCAUCG | | | |
| | | NDAERFNEI | GCCAGCUGAUCGACAAGCUGGUGCAGAACAACGUGCUGC | | | |
| | | VKNQKISAN | UGAUCUUCGCCGUGACCCAGGAGCAGGUGCACCUCUACG | | | |
| | | IDAPEGGED | AGAACUACGCCAAGCUGAUUCCAGGCGCCACCGUCGGUC | | | |
| | | AIMQAAVCK | UGCUGCAGAAGGACAGCGGCAACAUCCUGCAGCUGAUCA | | | |
| | | EKIGWRNDS | UCUCCGCCUACGAGGAGCUGAGGAGCGAGGUGGAGCUGG | | | |
| | | LHLLVFVSD | AGGUGCUCGGGGACACCGAGGGCCUGAACCUGUCCUUCA | | | |
| | | ADSHFGMDS | CCGCCAUCUGCAACAACGGGACCCUCUUCCAGCACCAGA | | | |
| | | KLAGIVIPN | AGAAGUGCAGCCACAUGAAGGUGGGCGACACCGCCAGCU | | | |
| | | DGLCHLDSK | UCAGCGUCACCGUGAACAUACCUCACUGUGAGCGGCGGA | | | |
| | | NEYSMSTVL | GCAGGCACAUCAUCAUCAAGCCCGUGGGCCUGGGAGACG | | | |
| | | EYPTIGQLI | CCCUGGAGCUGCUGGUGUCUCCCGAGUGCAACUGCGACU | | | |
| | | DKLVQNNVL | GCCAGAAGGAGGUGGAGGUGAACUCUAGCAAGUGCCACC | | | |
| | | LIFAVTQEQ | ACGGCAACGGGAGUUUCCAGUGUGGCGUGUGUGCCUGCC | | | |
| | | VHLYENYAK | ACCCCGGUCACAUGGGACCCCGGUGUGAGUGCGGGGAGG | | | |
| | | LIPGATVGL | ACAUGCUGAGCACCGACAGCUGCAAGGAGGCCCCAGACC | | | |
| | | LQKDSGNIL | ACCCGAGCUGUUCCGGUCGGGGCGACUGCUACUGCGGCC | | | |
| | | QLIISAYEE | AGUGCAUCUGUCACCUGAGCCCCUACGGCAACAUCUACG | | | |
| | | LRSEVELEV | GGCCCUACUGCCAGUGCGACAACUUCUCCUGCGUGCGCC | | | |
| | | LGDTEGLNL | ACAAAGGCCUGCUGUGUGGCGGCAACGGCGACUGCGACU | | | |
| | | SFTAICNNG | GCGGGGAGUGCGUGUGCCGCAGUGGGUGGACCGGCGAGU | | | |
| | | TLFQHQKKC | ACUGCAACUGCACCACCUCCACCGACUCUUGCGUGUCCG | | | |
| | | SHMKVGDTA | AGGACGGGGUGCUGUGUUCCGGGCGCGGAGAUUGCGUGU | | | |
| | | SFSVTVNIP | GCGGGAAGUGCGUGUGCACCAACCCUGGCGCAUCGGGUC | | | |
| | | HCERRSRHI | CUACCUGCGAGAGGUGCCCCACCUGUGGCGACCCCUGCA | | | |
| | | IIKPVGLGD | ACAGCAAGCGCUCUUGCAUCGAGUGCCACCUCUCAGCAG | | | |
| | | ALELLVSPE | CAGGGCAGGCUCGGGAGGAGUGCGUGGACAAGUGCAAGC | | | |
| | | CNCDCQKEV | UCGCCGGCGCCACCAUCAGUGAGGAGGAGGACUUCUCCA | | | |
| | | EVNSSKCHH | AGGACGGCAGCGUGUCCUGCUCCCUCCAGGGCGAGAACG | | | |
| | | GNGSFQCGV | AGUGCCUCAUCACCUUCCUGAUCACCACCGACAACGAGG | | | |
| | | CACHPGHMG | GCAAGACCAUCAUCCACUCCAUCAACGAGAAGGACUGCC | | | |
| | | PRCECGEDM | CCAAGCCGCCUAACAUCCCCAUGAUCAUGCUGGGCGUGA | | | |
| | | LSTDSCKEA | GCCUGGCCAUCCUGCUGAUCGGCGUGGUGCUGCUGUGCA | | | |
| | | PDHPSCSGR | UCUGGAAGCUGCUGGUCUCCUUCCACGACCGCAAGGAGG | | | |
| | | GDCYCGQCI | UGGCCAAGUUCGAGGCCGAGCGCUCUAAGGCCAAGUGGC | | | |
| | | CHLSPYGNI | AGACCGGCACCAACCCUCUGUACCGGGGCUCCACCAGCA | | | |
| | | YGPYCQCDN | CCUUCAAGAACGUGACCUACAAGCACCGCGAGAAGCAGA | | | |
| | | FSCVRHKGL | AGGUGGACCUGUCCACCGACUGUGGCAAGCCCAUCCCCA | | | |
| | | LCGGNGDCD | AUCCCCUGCUGGGGCUGGACUCCACC | | | |
| | | CGECVCRSG | | | | |
| | | WTGEYCNCT | | | | |
| | | TSTDSCVSE | | | | |
| | | DGVLCSGRG | | | | |
| | | DCVCGKCVC | | | | |
| | | TNPGASGPT | | | | |
| | | CERCPTCGD | | | | |
| | | PCNSKRSCI | | | | |
| | | ECHLSAAGQ | | | | |
| | | AREECVDKC | | | | |
| | | KLAGATISE | | | | |
| | | EEDFSKDGS | | | | |
| | | VSCSLQGEN | | | | |
| | | ECLITFLIT | | | | |
| | | TDNEGKTII | | | | |
| | | HSINEKDCP | | | | |
| | | KPPNIPMIM | | | | |
| | | LGVSLAILL | | | | |
| | | IGVVLLCIW | | | | |
| | | KLLVSFHDR | | | | |
| | | KEVAKFEAE | | | | |
| | | RSKAKWQTG | | | | |
| | | TNPLYRGST | | | | |
| | | STFKNVTYK | | | | |
| | | HREKQKVDL | | | | |
| | | STDCGKPIP | | | | |
| | | NPLLGLDST | | | | |
| | | 9 | 10 | 50 | 110 | 171 |
| Human | ITB6 | MGIELLCLFF | AUGGGGAUCGAGCUGCUGUGCCUGUUCUUCCUGUUCCUGG | GGAAAUCG | UGAUAAUA | SEQ ID |
| Var- | G5 | LFLGRNDHV | GACGGAACGACCACGUGCAGGGUGGCUGCGCCCUUGGUG | CAAAAUUU | GGCUGGAG | NO: 171 |
| iant | Cap C1 | QGGCALGGA | GGGCAGAGACCUGCGAGGACUGCCUGCUCAUCGGCCCAC | GCUCUUCG | CCUCGGUG | consists |
| 3.1 | Poly A | ETCEDCLLI | AGUGCGCCUGGUGCGCUCAGGAGAACUUCACCCACCCCA | CGUUAGAU | GCCUAGCU | from 5′ |
| | Tail: | GPQCAWCAQ | GCGGAGUGGGCGAGAGGUGCGACACCCCGGCCAACCUGC | UUCUUUUA | UCUUGCCC | to 3′ |
| | 100 nt | ENFTHPSGV | UGGCCAAGGGGUGCCAGCUGAACUUCAUCGAGAACCCCG | GUUUUCUC | CUUGGGCC | end: 5′ |
| | (SEQ ID | GERCDTPAN | UCUCUCAGGUGGAGAUCCUGAAGAACAAGCCCCUCAGCG | GCAACUAG | UCCCCCCA | UTR of |
| | NO: 502) | LLAKGCQLN | UUGGGCGGCAGAAGAACAGCUCUGACAUCGUGCAGAUCG | CAAGCUUU | GCCCCUCC | SEQ ID |
| | | FIENPVSQV | CGCCCCAGAGCCUGAUCCUGAAACUACGGCCUGGCGGUG | UUGUUCUC | UCCCCUUC | NO: 50, |
| | | EILKNKPLS | CGCAAACCCUGCAGGUCCACGUGCGGCAGACCGAGGACU | GCC | CUGCACCC | ORF |
| | | VGRQKNSSD | ACCCUGUGGACCUGUACUACCUGAUGGACCUCUCCUACA | | GUACCCCC | sequence |
| | | IVQIAPQSL | GCAUGGACGACGAUCUGAACACCAUCAAGGAGCUGGGCA | | CAAACACC | of SEQ |
| | | ILKLRPGGA | GCCGCCUGAGCAAGGAGAUGUCCAAGCUGACCUCCAACU | | AUUGUCAC | ID NO: |
| | | QTLQVHVRQ | UCCGCCUGGGGUUCGGAUCCUUCGUGGAGAAGCCCGUGA | | ACUCCAGU | 10, and |
| | | TEDYPVDLY | GCCCCUUCGUGAAGACCACCCCUGAGGAGAUCGCCAACC | | GGUCUUUG | 3′ UTR |
| | | YLMDLSYSM | CCUGCAGCAGCAUCCCUUACUUCUGCCUGCCCACCUUCG | | AAUAAAGU | sequence |
| | | DDDLNTIKE | GCUUCAAGCACAUCCUGCCACUGACCAACGACGCCGAGC | | CUGAGUGG | of SEQ |
| | | LGSRLSKEM | GGUUCAACGAGAUCGUGAAGAACCAGAAGAUCAGCGCCA | | GCGGC | ID NO: |
| | | SKLTSNFRL | ACAUCGACGCCCCGGAGGGUGGGUUCGACGCUAUCAUGC | | | 110. |
| | | GFGSFVEKP | AGGCCGCCGUGUGCAAGGAGAAGAUCGGCUGGCGCAACG | | | |
| | | VSPFVKTTP | ACAGCCUGCACCUGCUGGUGUUCGUGUCCGACGCCGACU | | | |
| | | EEIANPCSS | CCCACUUCGGCAUGGACAGCAAGCUGGCCGGUAUCGUGA | | | |
| | | IPYFCLPTF | UCCCUAACGACGGCCUGUGCCACCUGGACAGCAAGAACG | | | |
| | | GFKHILPLT | AGUACAGCAUGAGCACCGUGCUGGAGUACCCCACCAUCG | | | |
| | | NDAERFNEI | GCCAGCUGAUCGACAAGCUGGUGCAGAACAACGUGCUGC | | | |
| | | VKNQKISAN | UGAUCUUCGCCGUGACCCAGGAGCAGGUGCACCUCUACG | | | |
| | | IDAPEGGED | AGAACUACGCCAAGCUGAUUCCAGGCGCCACCGUCGGUC | | | |
| | | AIMQAAVCK | UGCUGCAGAAGGACAGCGGCAACAUCCUGCAGCUGAUCA | | | |
| | | EKIGWRNDS | UCUCCGCCUACGAGGAGCUGAGGAGCGAGGUGGAGCUGG | | | |
| | | LHLLVFVSD | AGGUGCUCGGGGACACCGAGGGCCUGAACCUGUCCUUCA | | | |
| | | ADSHFGMDS | CCGCCAUCUGCAACAACGGGACCCUCUUCCAGCACCAGA | | | |
| | | KLAGIVIPN | AGAAGUGCAGCCACAUGAAGGUGGGCGACACCGCCAGCU | | | |
| | | DGLCHLDSK | UCAGCGUCACCGUGAACAUACCUCACUGUGAGCGGCGGA | | | |
| | | NEYSMSTVL | GCAGGCACAUCAUCAUCAAGCCCGUGGGCCUGGGAGACG | | | |
| | | EYPTIGQLI | CCCUGGAGCUGCUGGUGUCUCCCGAGUGCAACUGCGACU | | | |
| | | DKLVQNNVL | GCCAGAAGGAGGUGGAGGUGAACUCUAGCAAGUGCCACC | | | |
| | | LIFAVTQEQ | ACGGCAACGGGAGUUUCCAGUGUGGCGUGUGUGCCUGCC | | | |
| | | VHLYENYAK | ACCCCGGUCACAUGGGACCCCGGUGUGAGUGCGGGGAGG | | | |
| | | LIPGATVGL | ACAUGCUGAGCACCGACAGCUGCAAGGAGGCCCCAGACC | | | |
| | | LQKDSGNIL | ACCCGAGCUGUUCCGGUCGGGGCGACUGCUACUGCGGCC | | | |
| | | QLIISAYEE | AGUGCAUCUGUCACCUGAGCCCCUACGGCAACAUCUACG | | | |
| | | LRSEVELEV | GGCCCUACUGCCAGUGCGACAACUUCUCCUGCGUGCGCC | | | |
| | | LGDTEGLNL | ACAAAGGCCUGCUGUGUGGCGGCAACGGCGACUGCGACU | | | |
| | | SFTAICNNG | GCGGGGAGUGCGUGUGCCGCAGUGGGUGGACCGGCGAGU | | | |
| | | TLFQHQKKC | ACUGCAACUGCACCACCUCCACCGACUCUUGCGUGUCCG | | | |
| | | SHMKVGDTA | AGGACGGGGUGCUGUGUUCCGGGCGCGGAGAUUGCGUGU | | | |
| | | SFSVTVNIP | GCGGGAAGUGCGUGUGCACCAACCCUGGCGCAUCGGGUC | | | |
| | | HCERRSRHI | CUACCUGCGAGAGGUGCCCCACCUGUGGCGACCCCUGCA | | | |
| | | IIKPVGLGD | ACAGCAAGCGCUCUUGCAUCGAGUGCCACCUCUCAGCAG | | | |
| | | ALELLVSPE | CAGGGCAGGCUCGGGAGGAGUGCGUGGACAAGUGCAAGC | | | |
| | | CNCDCQKEV | UCGCCGGCGCCACCAUCAGUGAGGAGGAGGACUUCUCCA | | | |
| | | EVNSSKCHH | AGGACGGCAGCGUGUCCUGCUCCCUCCAGGGCGAGAACG | | | |
| | | GNGSFQCGV | AGUGCCUCAUCACCUUCCUGAUCACCACCGACAACGAGG | | | |
| | | CACHPGHMG | GCAAGACCAUCAUCCACUCCAUCAACGAGAAGGACUGCC | | | |
| | | PRCECGEDM | CCAAGCCGCCUAACAUCCCCAUGAUCAUGCUGGGCGUGA | | | |
| | | LSTDSCKEA | GCCUGGCCAUCCUGCUGAUCGGCGUGGUGCUGCUGUGCA | | | |
| | | PDHPSCSGR | UCUGGAAGCUGCUGGUCUCCUUCCACGACCGCAAGGAGG | | | |
| | | GDCYCGQCI | UGGCCAAGUUCGAGGCCGAGCGCUCUAAGGCCAAGUGGC | | | |
| | | CHLSPYGNI | AGACCGGCACCAACCCUCUGUACCGGGGCUCCACCAGCA | | | |
| | | YGPYCQCDN | CCUUCAAGAACGUGACCUACAAGCACCGCGAGAAGCAGA | | | |
| | | FSCVRHKGL | AGGUGGACCUGUCCACCGACUGUGGCAAGCCCAUCCCCA | | | |
| | | LCGGNGDCD | AUCCCCUGCUGGGGCUGGACUCCACC | | | |
| | | CGECVCRSG | | | | |
| | | WTGEYCNCT | | | | |
| | | TSTDSCVSE | | | | |
| | | DGVLCSGRG | | | | |
| | | DCVCGKCVC | | | | |
| | | TNPGASGPT | | | | |
| | | CERCPTCGD | | | | |
| | | PCNSKRSCI | | | | |
| | | ECHLSAAGQ | | | | |
| | | AREECVDKC | | | | |
| | | KLAGATISE | | | | |
| | | EEDFSKDGS | | | | |
| | | VSCSLQGEN | | | | |
| | | ECLITFLIT | | | | |
| | | TDNEGKTII | | | | |
| | | HSINEKDCP | | | | |
| | | KPPNIPMIM | | | | |
| | | LGVSLAILL | | | | |
| | | IGVVLLCIW | | | | |
| | | KLLVSFHDR | | | | |
| | | KEVAKFEAE | | | | |
| | | RSKAKWQTG | | | | |
| | | TNPLYRGST | | | | |
| | | STFKNVTYK | | | | |
| | | HREKQKVDL | | | | |
| | | STDCGKPIP | | | | |
| | | NPLLGLDST | | | | |
| | | 11 | 12 | 50 | 110 | 172 |
| Human | ITB6 | MGIELLCLFF | AUGGGGAUCGAGCUGCUGUGCCUGUUCUUCCUGUUCCUGG | GGAAAUCG | UGAUAAUA | SEQ ID |
| Var- | G5 | LFLGRNDHV | GACGGAACGACCACGUGCAGGGUGGCUGCGCCCUUGGUG | CAAAAUUU | GGCUGGAG | NO: 172 |
| iant | Cap C1 | QGGCALGGA | GGGCAGAGACCUGCGAGGACUGCCUGCUCAUCGGCCCAC | GCUCUUCG | CCUCGGUG | consists |
| 4.1 | Poly A | ETCEDCLLI | AGUGCGCCUGGUGCGCUCAGGAGAACUUCACCCACCCCA | CGUUAGAU | GCCUAGCU | from 5′ |
| | Tail: | GPQCAWCAQ | GCGGAGUGGGCGAGAGGUGCGACACCCCGGCCAACCUGC | UUCUUUUA | UCUUGCCC | to 3′ |
| | 100 nt | ENFTHPSGV | UGGCCAAGGGGUGCCAGCUGAACUUCAUCGAGAACCCCG | GUUUUCUC | CUUGGGCC | end: 5′ |
| | (SEQ ID | GERCDTPAN | UCUCUCAGGUGGAGAUCCUGAAGAACAAGCCCCUCAGCG | GCAACUAG | UCCCCCCA | UTR of |
| | NO: 502) | LLAKGCQLN | UUGGGCGGCAGAAGAACAGCUCUGACAUCGUGCAGAUCG | CAAGCUUU | GCCCCUCC | SEQ ID |
| | | FIENPVSQV | CGCCCCAGAGCCUGAUCCUGAAACUACGGCCUGGCGGUG | UUGUUCUC | UCCCCUUC | NO: 50, |
| | | EILKNKPLS | CGCAAACCCUGCAGGUCCACGUGCGGCAGACCGAGGACU | GCC | CUGCACCC | ORF |
| | | VGRQKNSSD | ACCCUGUGGACCUGUACUACCUGAUGGACCUCUCCUACA | | GUACCCCC | sequence |
| | | IVQIAPQSL | GCAUGGACGACGAUCUGAACACCAUCAAGGAGCUGGGCA | | CAAACACC | of SEQ |
| | | ILKLRPGGA | GCCGCCUGAGCAAGGAGAUGUCCAAGCUGACCUCCAACU | | AUUGUCAC | ID NO: |
| | | QTLQVHVRQ | UCCGCCUGGGGUUCGGAUCCUUCGUGGAGAAGCCCGUGA | | ACUCCAGU | 12, and |
| | | TEDYPVDLY | GCCCCUUCGUGAAGACCACCCCUGAGGAGAUCGCCAACC | | GGUCUUUG | 3′ UTR |
| | | YLMDLSYSM | CCUGCAGCAGCAUCCCUUACUUCUGCCUGCCCACCUUCG | | AAUAAAGU | sequence |
| | | DDDLNTIKE | GCUUCAAGCACAUCCUGCCACUGACCAACGACGCCGAGC | | CUGAGUGG | of SEQ |
| | | LGSRLSKEM | GGUUCAACGAGAUCGUGAAGAACCAGAAGAUCAGCAGAA | | GCGGC | ID NO: |
| | | SKLTSNFRL | ACAUCGACGCCCCGGAGGGUGGGUUCGACGCUAUCAUGC | | | 110. |
| | | GFGSFVEKP | AGGCCGCCGUGUGCAAGGAGAAGAUCGGCUGGCGCAACG | | | |
| | | VSPFVKTTP | ACAGCCUGCACCUGCUGGUGUUCGUGUCCGACGCCGACU | | | |
| | | EEIANPCSS | CCCACUUCGGCAUGGACAGCAAGCUGGCCGGUAUCGUGA | | | |
| | | IPYFCLPTF | UCCCUAACGACGGCCUGUGCCACCUGGACAGCAAGAACG | | | |
| | | GFKHILPLT | AGUACAGCAUGAGCACCGUGCUGGAGUACCCCACCAUCG | | | |
| | | NDAERFNEI | GCCAGCUGAUCGACAAGCUGGUGCAGAACAACGUGCUGC | | | |
| | | VKNQKISRN | UGAUCUUCGCCGUGACCCAGGAGCAGGUGCACCUCUACG | | | |
| | | IDAPEGGED | AGAACUACGCCAAGCUGAUUCCAGGCGCCACCGUCGGUC | | | |
| | | AIMQAAVCK | UGCUGCAGAAGGACAGCGGCAACAUCCUGCAGCUGAUCA | | | |
| | | EKIGWRNDS | UCUCCGCCUACGAGGAGCUGAGGAGCGAGGUGGAGCUGG | | | |
| | | LHLLVFVSD | AGGUGCUCGGGGACACCGAGGGCCUGAACCUGUCCUUCA | | | |
| | | ADSHFGMDS | CCGCCAUCUGCAACAACGGGACCCUCUUCCAGCACCAGA | | | |
| | | KLAGIVIPN | AGAAGUGCAGCCACAUGAAGGUGGGCGACACCGCCAGCU | | | |
| | | DGLCHLDSK | UCAGCGUCACCGUGAACAUACCUCACUGUGAGCGGCGGA | | | |
| | | NEYSMSTVL | GCAGGCACAUCAUCAUCAAGCCCGUGGGCCUGGGAGACG | | | |
| | | EYPTIGQLI | CCCUGGAGCUGCUGGUGUCUCCCGAGUGCAACUGCGACU | | | |
| | | DKLVQNNVL | GCCAGAAGGAGGUGGAGGUGAACUCUAGCAAGUGCCACC | | | |
| | | LIFAVTQEQ | ACGGCAACGGGAGUUUCCAGUGUGGCGUGUGUGCCUGCC | | | |
| | | VHLYENYAK | ACCCCGGUCACAUGGGACCCCGGUGUGAGUGCGGGGAGG | | | |
| | | LIPGATVGL | ACAUGCUGAGCACCGACAGCUGCAAGGAGGCCCCAGACC | | | |
| | | LQKDSGNIL | ACCCGAGCUGUUCCGGUCGGGGCGACUGCUACUGCGGCC | | | |
| | | QLIISAYEE | AGUGCAUCUGUCACCUGAGCCCCUACGGCAACAUCUACG | | | |
| | | LRSEVELEV | GGCCCUACUGCCAGUGCGACAACUUCUCCUGCGUGCGCC | | | |
| | | LGDTEGLNL | ACAAAGGCCUGCUGUGUGGCGGCAACGGCGACUGCGACU | | | |
| | | SFTAICNNG | GCGGGGAGUGCGUGUGCCGCAGUGGGUGGACCGGCGAGU | | | |
| | | TLFQHQKKC | ACUGCAACUGCACCACCUCCACCGACUCUUGCGUGUCCG | | | |
| | | SHMKVGDTA | AGGACGGGGUGCUGUGUUCCGGGCGCGGAGAUUGCGUGU | | | |
| | | SFSVTVNIP | GCGGGAAGUGCGUGUGCACCAACCCUGGCGCAUCGGGUC | | | |
| | | HCERRSRHI | CUACCUGCGAGAGGUGCCCCACCUGUGGCGACCCCUGCA | | | |
| | | IIKPVGLGD | ACAGCAAGCGCUCUUGCAUCGAGUGCCACCUCUCAGCAG | | | |
| | | ALELLVSPE | CAGGGCAGGCUCGGGAGGAGUGCGUGGACAAGUGCAAGC | | | |
| | | CNCDCQKEV | UCGCCGGCGCCACCAUCAGUGAGGAGGAGGACUUCUCCA | | | |
| | | EVNSSKCHH | AGGACGGCAGCGUGUCCUGCUCCCUCCAGGGCGAGAACG | | | |
| | | GNGSFQCGV | AGUGCCUCAUCACCUUCCUGAUCACCACCGACAACGAGG | | | |
| | | CACHPGHMG | GCAAGACCAUCAUCCACUCCAUCAACGAGAAGGACUGCC | | | |
| | | PRCECGEDM | CCAAGCCGCCUAACAUCCCCAUGAUCAUGCUGGGCGUGA | | | |
| | | LSTDSCKEA | GCCUGGCCAUCCUGCUGAUCGGCGUGGUGCUGCUGUGCA | | | |
| | | PDHPSCSGR | UCUGGAAGCUGCUGGUCUCCUUCCACGACCGCAAGGAGG | | | |
| | | GDCYCGQCI | UGGCCAAGUUCGAGGCCGAGCGCUCUAAGGCCAAGUGGC | | | |
| | | CHLSPYGNI | AGACCGGCACCAACCCUCUGUACCGGGGCUCCACCAGCA | | | |
| | | YGPYCQCDN | CCUUCAAGAACGUGACCUACAAGCACCGCGAGAAGCAGA | | | |
| | | FSCVRHKGL | AGGUGGACCUGUCCACCGACUGUGGCAAGCCCAUCCCCA | | | |
| | | LCGGNGDCD | AUCCCCUGCUGGGGCUGGACUCCACC | | | |
| | | CGECVCRSG | | | | |
| | | WTGEYCNCT | | | | |
| | | TSTDSCVSE | | | | |
| | | DGVLCSGRG | | | | |
| | | DCVCGKCVC | | | | |
| | | TNPGASGPT | | | | |
| | | CERCPTCGD | | | | |
| | | PCNSKRSCI | | | | |
| | | ECHLSAAGQ | | | | |
| | | AREECVDKC | | | | |
| | | KLAGATISE | | | | |
| | | EEDFSKDGS | | | | |
| | | VSCSLQGEN | | | | |
| | | ECLITFLIT | | | | |
| | | TDNEGKTII | | | | |
| | | HSINEKDCP | | | | |
| | | KPPNIPMIM | | | | |
| | | LGVSLAILL | | | | |
| | | IGVVLLCIW | | | | |
| | | KLLVSFHDR | | | | |
| | | KEVAKFEAE | | | | |
| | | RSKAKWQTG | | | | |
| | | TNPLYRGST | | | | |
| | | STFKNVTYK | | | | |
| | | HREKQKVDL | | | | |
| | | STDCGKPIP | | | | |
| | | NPLLGLDST | | | | |
| | | 13 | 14 | 50 | 110 | 173 |
| Rat | ITB6 | MGIELVCLFL | AUGGGCAUCGAGCUGGUGUGCCUGUUCCUGUUACUACUGG | GGAAAUCG | UGAUAAUA | SEQ ID |
| Var- | G5 | LLLGRNDHV | GCAGAAACGACCACGUGCAGGGCGGCUGCGCCUGGAGCG | CAAAAUUU | GGCUGGAG | NO: 173 |
| iant | Cap II-b | QGGCAWSGA | GCGCCGAAACCUGCAGCGACUGCCUGCUGACCGGCCCUC | GCUCUUCG | CCUCGGUG | consists |
| 1.1 | Poly A | ETCSDCLLT | ACUGCGCUUGGUGCAGCCAGGAGAACUUCACCCACCUCU | CGUUAGAU | GCCUAGCU | from 5′ |
| | Tail: | GPHCAWCSQ | CAGGCGCUGGCGAGCGGUGCGACACCCCUGAGAACCUGC | UUCUUUUA | UCUUGCCC | to 3′ |
| | 100 nt | ENFTHLSGA | UGGCCAAGGGCUGCCAGCUGCCUUUCAUCGAGAACCCUG | GUUUUCUC | CUUGGGCC | end: 5′ |
| | (SEQ ID | GERCDTPEN | UGAGCCAGGUGGAGAUCCUGCAGAACAAGCCUCUGAGCG | GCAACUAG | UCCCCCCA | UTR of |
| | NO: 502) | LLAKGCQLP | UGGGCAGACAGAAGAACAGCAGCGACAUCGUGCAGAUCG | CAAGCUUU | GCCCCUCC | SEQ ID |
| | | FIENPVSQV | CCCCUCAGAGUCUCGUUCUGAAGCUUCGGCCUGGCGGCG | UUGUUCUC | UCCCCUUC | NO: 50, |
| | | EILQNKPLS | AGCAGACCCUGCAGGUGCAGGUGAGACAGACCGAGGACU | GCC | CUGCACCC | ORF |
| | | VGRQKNSSD | ACCCUGUGGACCUGUACUACCUGAUGGACUUAUCCGCCA | | GUACCCCC | sequence |
| | | IVQIAPQSL | GCAUGGACGACGACCUGAACACCAUCAAGGAGCUGGGCA | | CAAACACC | of SEQ |
| | | VLKLRPGGE | GCAGACUUGCAAAGGAGAUGAGCAAGCUGACCAGCAACU | | AUUGUCAC | ID NO: |
| | | QTLQVQVRQ | UCAGACUGGGCUUCGGCAGCUUCGUGGAGAAGCCAGUUA | | ACUCCAGU | 14, and |
| | | TEDYPVDLY | GUCCUUUCAUGAAGACGACCCCAGAGGAGAUCACCAACC | | GGUCUUUG | 3′ UTR |
| | | YLMDLSASM | CUUGCAGCAGCAUCCCUUACUUCUGCCUGCCUACCUUCG | | AAUAAAGU | sequence |
| | | DDDLNTIKE | GCUUCAAGCACAUCCUGCCUCUGACCGACGACGCCGAGA | | CUGAGUGG | of SEQ |
| | | LGSRLAKEM | GAUUCAACGAGAUCGUGAGAAAGCAGAAGAUCAGCGCCA | | GCGGC | ID NO: |
| | | SKLTSNFRL | ACAUCGAUACACCUGAGGGAGGUUUCGACGCCAUCAUGC | | | 110. |
| | | GFGSFVEKP | AGGCCGCCGUGUGCAAGGAGAAGAUCGGCUGGCGAAACG | | | |
| | | VSPFMKTTP | ACAGCCUGCACCUUCUAGUGUUCGUGAGCGACGCAGACA | | | |
| | | EEITNPCSS | GCCACUUCGGCAUGGACUCUAAGCUAGCCGGCAUCGUGA | | | |
| | | IPYFCLPTF | UCCCUAACGACGGCCUGUGCCACCUGGACAAUCGUAACG | | | |
| | | GFKHILPLT | AGUACAGCAUGAGCACCGUGCUGGAGUACCCUACCAUCG | | | |
| | | DDAERFNEI | GCCAGCUGAUCGACAAGCUUGUGCAGAAUAACGUGCUGC | | | |
| | | VRKQKISAN | UGAUCUUCGCCGUGACCCAGGAGCAGGUCCACCUGUACG | | | |
| | | IDTPEGGED | AGAACUACGCCAAGCUGAUCCCUGGCGCCACCGUGGGCC | | | |
| | | AIMQAAVCK | UGCUGCAGAAGGACAGCGGCAACAUCUUACAGCUGAUUA | | | |
| | | EKIGWRNDS | UAUCAGCCUACGAGGAGCUGAGAAGCGAGGUGGAGCUGG | | | |
| | | LHLLVFVSD | AGGUGCUGGGCGACACCGAGGGCCUGAACCUGAGCUUCA | | | |
| | | ADSHFGMDS | CCGCCCUGUGCAGCAACGGCAUCCUGUUCCCUCACCAGA | | | |
| | | KLAGIVIPN | AGAAGUGUUCCCACAUGAAGGUCGGUGAUACAGCAUCAU | | | |
| | | DGLCHLDNR | UCAACGUGAGCGUGAGCAUUACCAAUUGCGAGAAGAGAA | | | |
| | | NEYSMSTVL | GCAGAAAGUUAAUAAUUAAGCCUGUCGGACUGGGCGAUA | | | |
| | | EYPTIGQLI | CUCUUGAAAUCCUAGUGAGCGCCGAGUGCGACUGUGAUU | | | |
| | | DKLVQNNVL | GCCAGAGAGAGGUGGAAGCCAAUUCUUCCAAGUGCCACC | | | |
| | | LIFAVTQEQ | ACGGCAACGGAUCCUUCCAGUGCGGCGUGUGCGCCUGCA | | | |
| | | VHLYENYAK | ACCCUGGCCACAUGGGCCCUCGAUGCGAGUGUGGAGAGG | | | |
| | | LIPGATVGL | ACAUGGUUUCUACCGACAGCUGCAAGGAAAGCCCAGGCC | | | |
| | | LQKDSGNIL | AUCCUAGCUGCAGCGGCAGAGGCGACUGCUACUGCGGCC | | | |
| | | QLIISAYEE | AGUGCGUGUGCCAUCUGAGUCCUUACGGCAGCAUCUACG | | | |
| | | LRSEVELEV | GCCCUUACUGUCAGUGCGAUAACUUCUCGUGCCUGAGAC | | | |
| | | LGDTEGLNL | ACAAGGGUUUGCUGUGCGGUGACAACGGAGAUUGUGACU | | | |
| | | SFTALCSNG | GCGGAGAGUGCGUGUGUAGAGACGGCUGGACCGGCGAGU | | | |
| | | ILFPHQKKC | ACUGCAACUGCACCACCAGCAGGGACGCCUGCGCCAGCG | | | |
| | | SHMKVGDTA | AGGACGGCGUGUUGUGUUCUGGACGUGGUGAUUGUGUGU | | | |
| | | SFNVSVSIT | GUGGCAAGUGCGUCUGCAGAAACCCGGGAGCCAGCGGCC | | | |
| | | NCEKRSRKL | CUACCUGUGAGAGGUGCCCAACUUGUGGCGAUCCUUGCA | | | |
| | | IIKPVGLGD | AUUCACGUAGGAGCUGCAUCGAGUGCUACUUGAGCGCUG | | | |
| | | TLEILVSAE | ACGGCCAGGCCCAGGAGGAGUGCGAGGAUAAGUGCAAGG | | | |
| | | CDCDCQREV | CCACCGGAGCAACUAUCUCUGAGGAAGAAUUCAGCAAGG | | | |
| | | EANSSKCHH | ACACCAGCGUGCCUUGCAGUUUGCAGGGAGAGAACGAGU | | | |
| | | GNGSFQCGV | GCCUGAUCACCUUCCUCAUCACCGCCGACAACGAGGGCA | | | |
| | | CACNPGHMG | AGACCAUCAUCCACAAUAUUAGCGAGAAGGACUGCCCUA | | | |
| | | PRCECGEDM | AGCCUCCUAACAUCCCUAUGAUCAUGCUGGGAGUGAGCU | | | |
| | | VSTDSCKES | UGGCUAUCCUGCUUAUCGGCGUGGUCUUGCUGUGUAUCU | | | |
| | | PGHPSCSGR | GGAAGCUCCUCGUCAGUUUCCACGACAGAAAGGAGGUGG | | | |
| | | GDCYCGQCV | CCAAGUUCGAGGCUGAAAGAUCUAAGGCCAAGUGGCAGA | | | |
| | | CHLSPYGSI | CCGGAACCAAUCCUCUGUACAGAGGCAGCACCAGCACCU | | | |
| | | YGPYCQCDN | UCAAGAACGUGACCUACAAGCACCGGGAGAAGCACAAGG | | | |
| | | FSCLRHKGL | UCGGCCUGAGUAGCGACGGCGGCAAGCCUAUUCCAAACC | | | |
| | | LCGDNGDCD | CACUGCUCGGUCUGGACUCAACC | | | |
| | | CGECVCRDG | | | | |
| | | WTGEYCNCT | | | | |
| | | TSRDACASE | | | | |
| | | DGVLCSGRG | | | | |
| | | DCVCGKCVC | | | | |
| | | RNPGASGPT | | | | |
| | | CERCPTCGD | | | | |
| | | PCNSRRSCI | | | | |
| | | ECYLSADGQ | | | | |
| | | AQEECEDKC | | | | |
| | | KATGATISE | | | | |
| | | EEFSKDTSV | | | | |
| | | PCSLQGENE | | | | |
| | | CLITFLITA | | | | |
| | | DNEGKTIIH | | | | |
| | | NISEKDCPK | | | | |
| | | PPNIPMIML | | | | |
| | | GVSLAILLI | | | | |
| | | GVVLLCIWK | | | | |
| | | LLVSFHDRK | | | | |
| | | EVAKFEAER | | | | |
| | | SKAKWQTGT | | | | |
| | | NPLYRGSTS | | | | |
| | | TFKNVTYKH | | | | |
| | | REKHKVGLS | | | | |
| | | SDGGKPIPN | | | | |
| | | PLLGLDST | | | | |
| | | 15 | 16 | 56 | 110 | 174 |
| Mouse | ITB6 | MGIELVCLF | AUGGGCAUCGAGCUGGUGUGCCUGUUCCUGCUACUCUUA | GGAAAUAA | UGAUAAUA | SEQ ID |
| Var- | G5 | LLLLGRNDH | GGCAGAAACGACCACGUGCAAGGCGGCUGCGCCUGGGGA | GAGAGAAA | GGCUGGAG | NO: 174 |
| iant | Cap II-b | VQGGCAWGG | GGUGCCGAGAGCUGCAGCGACUGCCUGCUGACCGGCCCU | AGAAGAGU | CCUCGGUG | consists |
| 1.1 | Poly A | AESCSDCLL | CACUGUGCGUGGUGCAGCCAGGAGAACUUCACCCACCUG | AAGAAGAA | GCCUAGCU | from 5′ |
| | Tail: | TGPHCAWCS | AGUGGCGCCGGCGAGCGAUGCGACACCCCUGCCAACCUG | AUAUAAGA | UCUUGCCC | to 3′ |
| | 100 nt | QENFTHLSG | CUGGCCAAGGGCUGCCAGCUGCCUUUCAUCGAGAACCCU | CCCCGGCG | CUUGGGCC | end: 5′ |
| | (SEQ ID | AGERCDTPA | GUGAGCAGAAUCGAGGUGCUGCAGAACAAGCCUCUGAGC | CCGCCACC | UCCCCCCA | UTR of |
| | NO: 502) | NLLAKGCQL | GUGGGCAGACAGAAGAACAGCAGCGACAUCGUGCAGAUC | | GCCCCUCC | SEQ ID |
| | | PFIENPVSR | GCCCCUCAGUCACUUGUACUGAAGUUGCGGCCUGGCAGA | | UCCCCUUC | NO: 56, |
| | | IEVLONKPL | GAGCAGACCCUGCAGGUGCAGGUGAGACAGACCGAGGAC | | CUGCACCC | ORF |
| | | SVGRQKNSS | UACCCUGUGGACCUGUACUACCUGAUGGAUCUGAGCGCC | | GUACCCCC | sequence |
| | | DIVQIAPQS | AGCAUGGACGACGACCUGAACACCAUCAAGGAACUGGGU | | CAAACACC | of SEQ |
| | | LVLKLRPGR | AGCAGACUGGCUAAGGAGAUGAGCAAGCUGACCAGCAAC | | AUUGUCAC | ID NO: |
| | | EQTLQVQVR | UUCAGACUGGGCUUCGGCAGCUUCGUGGAGAAGCCUGUU | | ACUCCAGU | 16, and |
| | | QTEDYPVDL | UCACCUUUCAUGAAGACCACCCCUGAGGAGAUCACCAAC | | GGUCUUUG | 3′ UTR |
| | | YYLMDLSAS | CCUUGCAGCAGCAUCCCUUACUUCUGCCUGCCUACCUUC | | AAUAAAGU | sequence |
| | | MDDDLNTIK | GGCUUCAAGCACAUCCUGCCUCUGACCGACGACGCGGAG | | CUGAGUGG | of SEQ |
| | | ELGSRLAKE | AGAUUCAACGAGAUCGUGAGAAAGCAGAAGAUCAGCGCC | | GCGGC | ID NO: |
| | | MSKLTSNFR | AACAUUGACACCCCGGAAGGCGGAUUCGACGCCAUCAUG | | | 110. |
| | | LGFGSFVEK | CAGGCCGCCGUGUGCAAGGAGAAGAUCGGCUGGAGAAAC | | | |
| | | PVSPFMKTT | GAUAGCCUGCAUUUGUUAGUGUUCGUGAGUGACGCAGAC | | | |
| | | PEEITNPCS | AGCCACUUCGGCAUGGACUCCAAGCUUGCCGGCAUCGUG | | | |
| | | SIPYFCLPT | AUCCCUAACGACGGCCUGUGCCACCUGGACCACAGGAAC | | | |
| | | FGFKHILPL | GAGUACAGCAUGAGCACCGUGCUGGAGUACCCUACCAUC | | | |
| | | TDDAERFNE | GGCCAGCUGAUCGACAAGCUGGUCCAGAAUAACGUGCUG | | | |
| | | IVRKQKISA | CUGAUCUUCGCCGUGACCCAGGAACAGGUUCACCUGUAC | | | |
| | | NIDTPEGGF | GAGAACUACGCCAAGCUGAUCCCUGGCGCCACCGUGGGC | | | |
| | | DAIMQAAVC | CUCCUGCAGAAGGACAGCGGCAACAUCCUCCAACUGAUC | | | |
| | | KEKIGWRND | AUAUCUGCUUACGAGGAGCUGAGAAGCGAGGUGGAGCUG | | | |
| | | SLHLLVFVS | GAGGUGCUCGGCGACACCGAGGGCCUGAACCUGAGCUUC | | | |
| | | DADSHFGMD | ACCGCCCUGUGCAACAACGGCGUGCUGUUCCCUCACCAG | | | |
| | | SKLAGIVIP | AAGAAGUGUAGUCACAUGAAGGUUGGCGAUACCGCCAGC | | | |
| | | NDGLCHLDH | UUCAACGUGACCGUGAGCGUGAGCAACUGCGAGAAGAGA | | | |
| | | RNEYSMSTV | AGCAGAAACCUUAUAAUAAAGCCAGUUGGUCUGGGCGAC | | | |
| | | LEYPTIGQL | ACACUGGAGAUCCUGGUGAGCGCCGAGUGCGACUGCGAU | | | |
| | | IDKLVQNNV | UGUCAGAGAGAGAUCGAGACAAAUUCGUCUAAGUGCCAC | | | |
| | | LLIFAVTQE | AACGGCAACGGAUCUUUCCAGUGCGGCGUGUGCACCUGC | | | |
| | | QVHLYENYA | AACCCUGGCCACAUGGGACCACACUGCGAGUGCGGAGAG | | | |
| | | KLIPGATVG | GACAUGGUGUCAACCGACAGCUGUAAGGAGAGCCCAGGC | | | |
| | | LLQKDSGNI | CAUCCUUCUUGCUCCGGCAGAGGCGACUGCUACUGCGGC | | | |
| | | LQLIISAYE | CAGUGCAUCUGCCAUCUCUCCCCUUACGGCAGCAUCUAC | | | |
| | | ELRSEVELE | GGCCCUUACUGCCAGUGCGAUAACUUCUCGUGCCUGAGA | | | |
| | | VLGDTEGLN | CACAAGGGCCUGCUCUGCGGCGACAACGGCGACUGUGAU | | | |
| | | LSFTALCNN | UGUGGUGAGUGUGUGUGCAGAGACGGCUGGACCGGCGAG | | | |
| | | GVLFPHQKK | UACUGCAACUGCACCACCAACAGAGAUAGCUGUACCAGC | | | |
| | | CSHMKVGDT | GAGGACGGUGUCCUCUGUUCCGGACGGGGUGAUUGCGUU | | | |
| | | ASFNVTVSV | UGUGGCAAGUGUGUUUGCCGUAACCCAGGAGCCAGCGGC | | | |
| | | SNCEKRSRN | CCUACCUGCGAAAGGUGCCCGACCUGUGGAGAUCCGUGU | | | |
| | | LIIKPVGLG | AACAGCAAGCGAAGUUGCAUCGAGUGCUAUCUCUCCGCA | | | |
| | | DTLEILVSA | GACGGCCAGGCCCAGGAGGAGUGCGCCGACAAGUGCAAG | | | |
| | | ECDCDCQRE | GCCAUCGGCGCUACUAUUUCGGAAGAGGACUUCAGCAAG | | | |
| | | IETNSSKCH | GACACCAGCGUUAGCUGUUCGCUGCAGGGUGAGAACGAG | | | |
| | | NGNGSFQCG | UGCCUGAUCACCUUCCUCAUCACGACCGACAACGAGGGC | | | |
| | | VCTCNPGHM | AAGACCAUCAUCCACAACAUCAACGAGAAGGACUGCCCU | | | |
| | | GPHCECGED | AAGCCUCCUAACAUCCCUAUGAUCAUGCUGGGAGUGAGC | | | |
| | | MVSTDSCKE | CUGGCCAUACUGCUUAUCGGCGUGGUUCUGCUGUGCAUU | | | |
| | | SPGHPSCSG | UGGAAGUUAUUAGUGAGUUUCCACGACAGAAAGGAGGUG | | | |
| | | RGDCYCGQC | GCCAAGUUCGAGGCCGAGAGGUCCAAGGCCAAGUGGCAG | | | |
| | | ICHLSPYGS | ACCGGCACGAACCCACUGUACAGAGGCAGCACCAGCACC | | | |
| | | IYGPYCQCD | UUCAAGAACGUCACAUACAAGCACCGGGAGAAGCACAAG | | | |
| | | NFSCLRHKG | GCCGGCCUGUCAUCUGACGGCGGCAAGCCUAUCCCGAAU | | | |
| | | LLCGDNGDC | CCACUCCUAGGACUGGAUAGUACC | | | |
| | | DCGECVCRD | | | | |
| | | GWTGEYCNC | | | | |
| | | TTNRDSCTS | | | | |
| | | EDGVLCSGR | | | | |
| | | GDCVCGKCV | | | | |
| | | CRNPGASGP | | | | |
| | | TCERCPTCG | | | | |
| | | DPCNSKRSC | | | | |
| | | IECYLSADG | | | | |
| | | QAQEECADK | | | | |
| | | CKAIGATIS | | | | |
| | | EEDFSKDTS | | | | |
| | | VSCSLQGEN | | | | |
| | | ECLITFLIT | | | | |
| | | TDNEGKTII | | | | |
| | | HNINEKDCP | | | | |
| | | KPPNIPMIM | | | | |
| | | LGVSLAILL | | | | |
| | | IGVVLLCIW | | | | |
| | | KLLVSFHDR | | | | |
| | | KEVAKFEAE | | | | |
| | | RSKAKWQTG | | | | |
| | | TNPLYRGST | | | | |
| | | STFKNVTYK | | | | |
| | | HREKHKAGL | | | | |
| | | SSDGGKPIP | | | | |
| | | NPLLGLDST | | | | |

Note:
“G5” indicates that all uracils (U) in the mRNA are replaced by N1-methylpseudouracils.
Signal sequence underlined; tag sequence italicized and underlined

### Lipid Content of LNPs

[0646] As set forth above, with respect to lipids, LNPs disclosed herein comprise an (i) ionizable lipid; (ii) sterol or other structural lipid; (iii) a non-cationic helper lipid or phospholipid; and a (iv) PEG lipid along with the nucleic acid cargo of interest. The lipid nanoparticles of the invention can be generated using components, compositions, and methods as are generally known in the art, see for example PCT/US2016/052352; PCT/US2016/068300; PCT/US2017/037551; PCT/US2015/027400; PCT/US2016/047406; PCT/US2016000129; PCT/US2016/014280; PCT/US2016/014280; PCT/US2017/038426; PCT/US2014/027077; PCT/US2014/055394; PCT/US2016/52117; PCT/US2012/069610; PCT/US2017/027492; PCT/US2016/059575 and PCT/US2016/069491 all of which are incorporated by reference herein in their entirety.

[0647] Nucleic acids of the present disclosure (e.g., ITB6 mRNA) are typically formulated in lipid nanoparticle. In some embodiments, the lipid nanoparticle comprises at least one ionizable cationic lipid, at least one non-cationic lipid, at least one sterol, and/or at least one polyethylene glycol (PEG)-modified lipid.

[0648] In some embodiments, the lipid nanoparticle comprises a molar ratio of 20-60% ionizable cationic lipid. For example, the lipid nanoparticle may comprise a molar ratio of 40-50 mol %, optionally 45-50 mol %, for example, 45-46 mol %, 46-47 mol %, 47-48 mol %, 48-49 mol %, or 49-50 mol %, for example about 45 mol %, 45.5 mol %, 46 mol %, 46.5 mol %, 47 mol %, 47.5 mol %, 48 mol %, 48.5 mol %, 49 mol %, or 49.5 mol % ionizable cationic lipid.

[0649] In some embodiments, the lipid nanoparticle comprises a molar ratio of 5-25% non-cationic lipid. For example, the lipid nanoparticle may comprise a molar ratio of 5-15 mol %, optionally 10-12 mol %, for example, 5-6 mol %, 6-7 mol %, 7-8 mol %, 8-9 mol %, 9-10 mol %, 10-11 mol %, 11-12 mol %, 12-13 mol %, 13-14 mol %, or 14-15 mol % non-cationic lipid. In some embodiments, the lipid nanoparticle comprises a molar ratio of 25-55% sterol.

[0650] For example, the lipid nanoparticle may comprise a molar ratio of 30-45 mol %, optionally 35-40 mol %, for example, 30-31 mol %, 31-32 mol %, 32-33 mol %, 33-34 mol %, 35-35 mol %, 35-36 mol %, 36-37 mol %, 38-38 mol %, 38-39 mol %, or 39-40 mol % sterol.

[0651] In some embodiments, the lipid nanoparticle comprises a molar ratio of 0.5-15% PEG-modified lipid. For example, the lipid nanoparticle may comprise a molar ratio of 1-5%, optionally 1-3 mol %, for example 1.5 to 2.5 mol %, 1-2 mol %, 2-3 mol %, 3-4 mol %, or 4-5 mol % PEG-modified lipid.

[0652] In some embodiments, the lipid nanoparticle comprises a molar ratio of 20-60% ionizable cationic lipid, 5-25% non-cationic lipid, 25-55% sterol, and 0.5-15% PEG-modified lipid.

[0653] In some embodiments, the lipid nanoparticle comprises a molar ratio of 40-50% ionizable cationic lipid, 5-15% non-cationic lipid, 30-45% sterol, and 1-5% PEG-modified lipid.

[0654] In some embodiments, the lipid nanoparticle comprises a molar ratio of 45-50% ionizable cationic lipid, 10-12% non-cationic lipid, 35-40% sterol, and 1-3% PEG-modified lipid. In some embodiments, the lipid nanoparticle comprises a molar ratio of 45-50% ionizable cationic lipid, 10-12% non-cationic lipid, 35-40% sterol, and 1.5-2.5% PEG-modified lipid.

### Ionizable Amino Lipids

[0655] The lipid nanoparticles of the present disclosure include one or more ionizable lipids. In certain embodiments, the ionizable lipids of the disclosure comprise a central amine moiety and at least one biodegradable group. The ionizable lipids described herein may be advantageously used in lipid nanoparticles of the disclosure for the delivery of nucleic acid molecules to mammalian cells or organs. The structures of ionizable lipids set forth below include the prefix I to distinguish them from other lipids of the invention.

[0656] In some aspects, the disclosure relates to a compound of Formula (I):

[chemical structure]

or its N-oxide, or a salt or isomer thereof,
[0657] wherein R′^{a} is R′^{branched}, wherein
   [0658] R′^{branched} is:

[chemical structure]

wherein

[chemical structure]

denotes a point of attachment;
[0659] wherein R^{aα}, R^{aβ}, R^{aγ}, and R^{aδ} are each independently selected from the group consisting of H, C₂₋₁₂ alkyl, and C₂₋₁₂ alkenyl;
[0660] R² and R³ are each independently selected from the group consisting of C₁₋₁₄ alkyl and C₂₋₁₄ alkenyl;
[0661] R⁴ is selected from the group consisting of —(CH₂)ₙOH, wherein n is selected from the group consisting of 1, 2, 3, 4, and 5, and

[chemical structure]

[0662] wherein

[chemical structure]

denotes a point of attachment; wherein
[0663] R¹⁰ is N(R)₂; each R is independently selected from the group consisting of C₁₋₆ alkyl, C₂₋₃ alkenyl, and H; and n2 is selected from the group consisting of 1, 2, 3, 4, 5, 6, 7, 8, 9, and 10;
[0664] each R⁵ is independently selected from the group consisting of C₁₋₃ alkyl, C₂₋₃ alkenyl, and H;
[0665] each R⁶ is independently selected from the group consisting of C₁₋₃ alkyl, C₂₋₃ alkenyl, and H;
[0666] M and M′ are each independently selected from the group consisting of —C(O)O— and —OC(O)—;
[0667] R′ is a C₁₋₁₂ alkyl or C₂₋₁₂ alkenyl;
[0668] l is selected from the group consisting of 1, 2, 3, 4, and 5; and
[0669] m is selected from the group consisting of 5, 6, 7, 8, 9, 10, 11, 12, and 13.

[0670] In some embodiments of the compounds of Formula (I), R′^{a} is R′^{branched}; R′^{branched} is

[chemical structure]

denotes a point of attachment; R^{aα}, R^{aβ}, R^{aγ}, and R^{aδ} are each H; R² and R³ are each C₁₋₁₄ alkyl; R⁴ is —(CH₂)ₙOH; n is 2; each R⁵ is H; each R⁶ is H; M and M′ are each —C(O)O—; R′ is a C₁₋₁₂ alkyl; l is 5; and m is 7.

[0671] In some embodiments of the compounds of Formula (I), R′^{a} is R′^{branched}; R′^{branched} is

[chemical structure]

denotes a point of attachment; R^{aα}, R^{aβ}, R^{aγ}, and R^{aδ} are each H; R² and R³ are each C₁₋₁₄ alkyl; R⁴ is —(CH₂)ₙOH; n is 2; each R⁵ is H; each R⁶ is H; M and M′ are each —C(O)O—; R′ is a C₁₋₁₂ alkyl; l is 3; and m is 7.

[0672] In some embodiments of the compounds of Formula (I), R′^{a} is R′^{branched}; R′^{branched} is

[chemical structure]

denotes a point of attachment; R^{aα} is C₂₋₁₂ alkyl; R^{aβ}, R^{aγ}, and R^{aδ} are each H; R² and R³ are each C₁₋₁₄ alkyl; R⁴ is

[chemical structure]

R¹⁰ is NH(C₁₋₆ alkyl); n2 is 2; R⁵ is H; each R⁶ is H; M and M′ are each —C(O)O—; R′ is a C₁₋₁₂ alkyl; l is 5; and m is 7.

[0673] In some embodiments of the compounds of Formula (I), R′^{a} is R′^{branched}; R′^{branched} is

[chemical structure]

denotes a point of attachment; R^{aα}, R^{aβ}, and R^{aδ} are each H; R^{aγ} is C₂₋₁₂ alkyl; R² and R³ are each C₁₋₁₄ alkyl; R⁴ is —(CH₂)ₙOH; n is 2; each R⁵ is H; each R⁶ is H; M and M′ are each —C(O)O—; R′ is a C₁₋₁₂ alkyl; l is 5; and m is 7.

[0674] In some embodiments, the compound of Formula (I) is selected from:

[chemical structure]

[0675] In some embodiments, the compound of Formula (I) is:

[chemical structure]

[0676] In some embodiments, the compound of Formula (I) is:

[chemical structure]

[0677] In some embodiments, the compound of Formula (I) is:

[chemical structure]

[0678] In some embodiments, the compound of Formula (I) is:

[chemical structure]

[0679] In some aspects, the disclosure relates to a compound of Formula (I-a):

[chemical structure]

or its N-oxide, or a salt or isomer thereof,
[0680] wherein R′^{a} is R′^{branched}; wherein
   [0681] R′^{branched} is:

[chemical structure]

wherein

[chemical structure]

denotes a point of attachment;
[0682] wherein R^{aβ}, R^{aγ}, and R^{aδ} are each independently selected from the group consisting of H, C₂₋₁₂ alkyl, and C₂₋₁₂ alkenyl;
[0683] R² and R³ are each independently selected from the group consisting of C₁₋₁₄ alkyl and C₂₋₁₄ alkenyl;
[0684] R⁴ is selected from the group consisting of —(CH₂)ₙOH, wherein n is selected from the group consisting of 1, 2, 3, 4 and 5, and

[chemical structure]

[0685] wherein

[chemical structure]

denotes a point of attachment; wherein
[0686] R¹⁰ is N(R)₂; each R is independently selected from the group consisting of C₁₋₆ alkyl, C₂₋₃ alkenyl, and H; and n2 is selected from the group consisting of 1, 2, 3, 4, 5, 6, 7, 8, 9, and 10;
[0687] each R⁵ is independently selected from the group consisting of C₁₋₃ alkyl, C₂₋₃ alkenyl, and H;
[0688] each R⁶ is independently selected from the group consisting of C₁₋₃ alkyl, C₂₋₃ alkenyl, and H;
[0689] M and M′ are each independently selected from the group consisting of —C(O)O— and —OC(O)—;
[0690] R′ is a C₁₋₁₂ alkyl or C₂₋₁₂ alkenyl;
[0691] l is selected from the group consisting of 1, 2, 3, 4, and 5; and
[0692] m is selected from the group consisting of 5, 6, 7, 8, 9, 10, 11, 12, and 13.

[0693] In some aspects, the disclosure relates to a compound of Formula (I-b):

[chemical structure]

or its N-oxide, or a salt or isomer thereof,
[0694] wherein R′^{a} is R′^{branched}; wherein
   [0695] R′^{branched} is:

[chemical structure]

wherein

[chemical structure]

denotes a point of attachment;
[0696] wherein R^{aα}, R^{aβ}, R^{aγ}, and R^{aδ} are each independently selected from the group consisting of H, C₂₋₁₂ alkyl, and C₂₋₁₂ alkenyl;
[0697] R² and R³ are each independently selected from the group consisting of C₁₋₁₄ alkyl and C₂₋₁₄ alkenyl;
[0698] R⁴ is —(CH₂)ₙOH, wherein n is selected from the group consisting of 1, 2, 3, 4, and 5;
[0699] each R⁵ is independently selected from the group consisting of C₁₋₃ alkyl, C₂₋₃ alkenyl, and H;
[0700] each R⁶ is independently selected from the group consisting of C₁₋₃ alkyl, C₂₋₃ alkenyl, and H;
[0701] M and M′ are each independently selected from the group consisting of —C(O)O— and —OC(O)—;
[0702] R′ is a C₁₋₁₂ alkyl or C₂₋₁₂ alkenyl;
[0703] l is selected from the group consisting of 1, 2, 3, 4, and 5; and
[0704] m is selected from the group consisting of 5, 6, 7, 8, 9, 10, 11, 12, and 13.

[0705] In some embodiments of Formula (I) or (I-b), R′^{a} is R′^{branched}; R′^{branched} as

[chemical structure]

denotes a point of attachment; R^{aβ}, R^{aγ}, and R^{aδ} are each H; R² and R³ are each C₁₋₁₄ alkyl; R⁴ is —(CH₂)ₙOH; n is 2; each R⁵ is H; each R⁶ is H; M and M′ are each —C(O)O—; R′ is a C₁₋₁₂ alkyl; l is 5; and m is 7.

[0706] In some embodiments of Formula (I) or (I-b), R′^{a} is R′^{branched}; R′^{branched} is

[chemical structure]

denotes a point of attachment; R^{aβ}, R^{aγ}, and R^{aδ} are each H; R² and R³ are each C₁₋₁₄ alkyl; R⁴ is —(CH₂)ₙOH; n is 2; each R⁵ is H; each R⁶ is H; M and M′ are each —C(O)O—; R′ is a C₁₋₁₂ alkyl; l is 3; and m is 7.

[0707] In some embodiments of Formula (I) or (I-b), R′^{a} is R′^{branched}; R′^{branched} is

[chemical structure]

denotes a point of attachment; R^{aβ} and R^{aδ} are each H; R^{aγ} is C₂₋₁₂ alkyl; R² and R³ are each C₁₋₁₄ alkyl; R⁴ is —(CH₂)ₙOH; n is 2; each R⁵ is H; each R⁶ is H; M and M′ are each —C(O)O—; R′ is a C₁₋₁₂ alkyl; l is 5; and m is 7.

[0708] In some aspects, the disclosure relates to a compound of Formula (I-c):

[chemical structure]

or its N-oxide, or a salt or isomer thereof,
[0709] wherein R′^{a} is R′^{branched}; wherein
   [0710] R′^{branched} is:

[chemical structure]

wherein

[chemical structure]

denotes a point of attachment;
[0711] wherein R^{aα}, R^{aβ}, R^{aγ}, and R^{aδ} are each independently selected from the group consisting of H, C₂₋₁₂ alkyl, and C₂₋₁₂ alkenyl;
[0712] R² and R³ are each independently selected from the group consisting of C₁₋₁₄ alkyl and C₂₋₁₄ alkenyl;
[0713] R⁴ is

[chemical structure]

[0714] wherein

[chemical structure]

denotes a point of attachment; wherein
[0715] R¹⁰ is N(R)₂; each R is independently selected from the group consisting of C₁₋₆ alkyl, C₂₋₃ alkenyl, and H; n2 is selected from the group consisting of 1, 2, 3, 4, 5, 6, 7, 8, 9, and 10;
[0716] each R⁵ is independently selected from the group consisting of C₁₋₃ alkyl, C₂₋₃ alkenyl, and H;
[0717] each R⁶ is independently selected from the group consisting of C₁₋₃ alkyl, C₂₋₃ alkenyl, and H;
[0718] M and M′ are each independently selected from the group consisting of —C(O)O— and —OC(O)—;
[0719] R′ is a C₁₋₁₂ alkyl or C₂₋₁₂ alkenyl;
[0720] l is selected from the group consisting of 1, 2, 3, 4, and 5; and
[0721] m is selected from the group consisting of 5, 6, 7, 8, 9, 10, 11, 12, and 13.

[0722] In some embodiments, R′^{a} is R′^{branched}; R′^{branched} is

[chemical structure]

denotes a point of attachment; R^{aβ}, R^{aγ}, and R^{aδ} are each H; R^{aα} is C₂₋₁₂ alkyl; R² and R³ are each C₁₋₁₄ alkyl; R⁴ is

[chemical structure]

denotes a point of attachment; R¹⁰ is NH(C₁₋₆ alkyl); n2 is 2; each R⁵ is H; each R⁶ is H; M and M′ are each —C(O)O—; R′ is a C₁₋₁₂ alkyl; l is 5; and m is 7.

[0723] In some embodiments, the compound of Formula (I-c) is:

[chemical structure]

[0724] In some aspects, the disclosure relates to a compound of Formula (II):

[chemical structure]

or its N-oxide, or a salt or isomer thereof,
[0725] wherein R′^{a} is R′^{branched} or R′^{cyclic}; wherein
[0726] R′^{branched} is:

[chemical structure]

and R′^{cyclic} is:

[chemical structure]

and
[0727] R′b is:

[chemical structure]

[0728] wherein

[chemical structure]

denotes a point of attachment;
[0729] R^{aγ} and R^{aδ} are each independently selected from the group consisting of H, C₁₋₁₂ alkyl, and C₂₋₁₂ alkenyl, wherein at least one of R^{aγ} and R^{aδ} is selected from the group consisting of C₁₋₁₂ alkyl and C₂₋₁₂ alkenyl;
[0730] R^{bγ} and R^{bδ} are each independently selected from the group consisting of H, C₁₋₁₂ alkyl, and C₂₋₁₂ alkenyl, wherein at least one of R^{bγ} and R^{bδ} is selected from the group consisting of C₁₋₁₂ alkyl and C₂₋₁₂ alkenyl;
[0731] R² and R³ are each independently selected from the group consisting of C₁₋₁₄ alkyl and C₂₋₁₄ alkenyl;
[0732] R⁴ is selected from the group consisting of —(CH₂)ₙOH wherein n is selected from the group consisting of 1, 2, 3, 4, and 5, and

[chemical structure]

[0733] wherein

[chemical structure]

denotes a point of attachment; wherein
[0734] R¹⁰ is N(R)₂; each R is independently selected from the group consisting of C₁₋₆ alkyl, C₂₋₃ alkenyl, and H; and n2 is selected from the group consisting of 1, 2, 3, 4, 5, 6, 7, 8, 9, and 10;
[0735] each R′ independently is a C₁₋₁₂ alkyl or C₂₋₁₂ alkenyl;
[0736] Y^{a} is a C₃₋₆ carbocycle;
[0737] R*″^{a} is selected from the group consisting of C₁₋₁₅ alkyl and C₂₋₁₅ alkenyl; and
[0738] s is 2 or 3;
[0739] m is selected from 1, 2, 3, 4, 5, 6, 7, 8, and 9;
[0740] l is selected from 1, 2, 3, 4, 5, 6, 7, 8, and 9.

[0741] In some aspects, the disclosure relates to a compound of Formula (II-a):

[chemical structure]

or its N-oxide, or a salt or isomer thereof,
[0742] wherein R′^{a} is R′^{branched} or R′^{cyclic}; wherein
[0743] R′^{branched} is:

[chemical structure]

and R′^{b} is:

[chemical structure]

[0744] wherein

[chemical structure]

denotes a point of attachment;
[0745] R^{aγ} and R^{aδ} are each independently selected from the group consisting of H, C₁₋₁₂ alkyl, and C₂₋₁₂ alkenyl, wherein at least one of R^{aγ} and R^{aδ} is selected from the group consisting of C₁₋₁₂ alkyl and C₂₋₁₂ alkenyl;
[0746] R^{bγ} and R^{bδ} are each independently selected from the group consisting of H, C₁₋₁₂ alkyl, and C₂₋₁₂ alkenyl, wherein at least one of R^{bγ} and R^{bδ} is selected from the group consisting of C₁₋₁₂ alkyl and C₂₋₁₂ alkenyl;
[0747] R² and R³ are each independently selected from the group consisting of C₁₋₁₄ alkyl and C₂₋₁₄ alkenyl;
[0748] R⁴ is selected from the group consisting of —(CH₂)ₙOH wherein n is selected from the group consisting of 1, 2, 3, 4, and 5, and

[chemical structure]

[0749] wherein

[chemical structure]

denotes a point of attachment; wherein
[0750] R¹⁰ is N(R)₂; each R is independently selected from the group consisting of C₁₋₆ alkyl, C₂₋₃ alkenyl, and H; and n2 is selected from the group consisting of 1, 2, 3, 4, 5, 6, 7, 8, 9, and 10;
[0751] each R′ independently is a C₁₋₁₂ alkyl or C₂₋₁₂ alkenyl;
[0752] m is selected from 1, 2, 3, 4, 5, 6, 7, 8, and 9;
[0753] l is selected from 1, 2, 3, 4, 5, 6, 7, 8, and 9.

[0754] In some aspects, the disclosure relates to a compound of Formula (II-b):

[chemical structure]

or its N-oxide, or a salt or isomer thereof,
[0755] wherein R′^{a} is R′^{branched} or R′^{cyclic}; wherein
[0756] R′^{branched} is:

[chemical structure]

and R′^{b} is:

[chemical structure]

[0757] wherein

[chemical structure]

denotes a point of attachment;
[0758] R^{aγ} and R^{bγ} are each independently selected from the group consisting of C₁₋₁₂ alkyl and C₂₋₁₂ alkenyl;
[0759] R² and R³ are each independently selected from the group consisting of C₁₋₁₄ alkyl and C₂₋₁₄ alkenyl;
[0760] R⁴ is selected from the group consisting of —(CH₂)ₙOH wherein n is selected from the group consisting of 1, 2, 3, 4, and 5, and

[chemical structure]

[0761] wherein

[chemical structure]

denotes a point of attachment; wherein
[0762] R¹⁰ is N(R)₂; each R is independently selected from the group consisting of C₁₋₆ alkyl, C₂₋₃ alkenyl, and H; and n2 is selected from the group consisting of 1, 2, 3, 4, 5, 6, 7, 8, 9, and 10;
[0763] each R′ independently is a C₁₋₁₂ alkyl or C₂₋₁₂ alkenyl;
[0764] m is selected from 1, 2, 3, 4, 5, 6, 7, 8, and 9;
[0765] l is selected from 1, 2, 3, 4, 5, 6, 7, 8, and 9.

[0766] In some aspects, the disclosure relates to a compound of Formula (II-c):

[chemical structure]

or its N-oxide, or a salt or isomer thereof,
[0767] wherein R′^{a} is R′^{branched} or R′^{cyclic}; wherein
[0768] R′^{branched} is:

[chemical structure]

and R′^{b} is:

[chemical structure]

[0769] wherein

[chemical structure]

denotes a point of attachment;
[0770] wherein R^{aγ} is selected from the group consisting of C₁₋₁₂ alkyl and C₂₋₁₂ alkenyl;
[0771] R² and R³ are each independently selected from the group consisting of C₁₋₁₄ alkyl and C₂₋₁₄ alkenyl;
[0772] R⁴ is selected from the group consisting of —(CH₂)ₙOH wherein n is selected from the group consisting of 1, 2, 3, 4, and 5, and

[chemical structure]

[0773] wherein

[chemical structure]

denotes a point of attachment; wherein
[0774] R¹⁰ is N(R)₂; each R is independently selected from the group consisting of C₁₋₆ alkyl, C₂₋₃ alkenyl, and H; and n2 is selected from the group consisting of 1, 2, 3, 4, 5, 6, 7, 8, 9, and 10;
[0775] R′ is a C₁₋₁₂ alkyl or C₂₋₁₂ alkenyl;
[0776] m is selected from 1, 2, 3, 4, 5, 6, 7, 8, and 9;
[0777] l is selected from 1, 2, 3, 4, 5, 6, 7, 8, and 9.

[0778] In some aspects, the disclosure relates to a compound of Formula (II-d):

[chemical structure]

or its N-oxide, or a salt or isomer thereof,
[0779] wherein R′^{a} is R′^{branched} or R′^{cyclic}; wherein
[0780] R′^{branched} is:

[chemical structure]

and R′^{b} is:

[chemical structure]

[0781] wherein

[chemical structure]

denotes a point of attachment;
[0782] wherein R^{aγ} and R^{bγ} are each independently selected from the group consisting of C₁₋₁₂ alkyl and C₂₋₁₂ alkenyl;
[0783] R⁴ is selected from the group consisting of —(CH₂)ₙOH wherein n is selected from the group consisting of 1, 2, 3, 4, and 5, and

[chemical structure]

[0784] wherein

[chemical structure]

denotes a point of attachment; wherein
[0785] R¹⁰ is N(R)₂; each R is independently selected from the group consisting of C₁₋₆ alkyl, C₂₋₃ alkenyl, and H; and n2 is selected from the group consisting of 1, 2, 3, 4, 5, 6, 7, 8, 9, and 10;
[0786] each R′ independently is a C₁₋₁₂ alkyl or C₂₋₁₂ alkenyl;
[0787] m is selected from 1, 2, 3, 4, 5, 6, 7, 8, and 9;
[0788] l is selected from 1, 2, 3, 4, 5, 6, 7, 8, and 9.

[0789] In some aspects, the disclosure relates to a compound of Formula (II-e):

[chemical structure]

or its N-oxide, or a salt or isomer thereof,
[0790] wherein R′^{a} is R′^{branched} or R′^{cyclic}; wherein
[0791] R′^{branched} is:

[chemical structure]

and R′^{b} is:

[chemical structure]

[0792] wherein

[chemical structure]

denotes a point of attachment;
[0793] wherein R^{aγ} is selected from the group consisting of C₁₋₁₂ alkyl and C₂₋₁₂ alkenyl;
[0794] R² and R³ are each independently selected from the group consisting of C₁₋₁₄ alkyl and C₂₋₁₄ alkenyl;
[0795] R⁴ is —(CH₂)ₙOH wherein n is selected from the group consisting of 1, 2, 3, 4, and 5;
[0796] R′ is a C₁₋₁₂ alkyl or C₂₋₁₂ alkenyl;
[0797] m is selected from 1, 2, 3, 4, 5, 6, 7, 8, and 9;
[0798] l is selected from 1, 2, 3, 4, 5, 6, 7, 8, and 9.

[0799] In some embodiments of the compound of Formula (II), (II-a), (II-b), (II-c), (II-d), or (II-e), m and l are each independently selected from 4, 5, and 6. In some embodiments of the compound of Formula (II), (II-a), (II-b), (II-c), (II-d), or (II-e), m and l are each 5.

[0800] In some embodiments of the compound of Formula (II), (II-a), (II-b), (II-c), (II-d), or (II-e), each R′ independently is a C₁₋₁₂ alkyl. In some embodiments of the compound of Formula (II), (II-a), (II-b), (II-c), (II-d), or (II-e), each R′ independently is a C₂₋₅ alkyl.

[0801] In some embodiments of the compound of Formula (II), (II-a), (II-b), (II-c), (II-d), or (II-e), R′^{b} is:

[chemical structure]

and R² and R³ are each independently a C₁₋₁₄ alkyl. In some embodiments of the compound of Formula (II), (II-a), (II-b), (II-c), (II-d), or (II-e), R′^{b} is:

[chemical structure]

and R² and R³ are each independently a C₆₋₁₀ alkyl. In some embodiments of the compound of Formula (II), (II-a), (II-b), (II-c), (II-d), or (II-e), R′^{b} is:

[chemical structure]

and R² and R³ are each a C₈ alkyl.

[0802] In some embodiments of the compound of Formula (II), (II-a), (II-b), (II-c), (II-d), or (II-e), R′^{branched} is:

[chemical structure]

### and R′^{b} is:

[chemical structure]

R^{aγ} is a C₁₋₁₂ alkyl and R² and R³ are each independently a C₆₋₁₀ alkyl. In some embodiments of the compound of Formula (II), (II-a), (II-b), (II-c), (II-d), or (II-e), R′^{branched} is:

[chemical structure]

### and R′^{b} is:

[chemical structure]

R^{aγ} is a C₂₋₆ alkyl and R² and R³ are each independently a C₆₋₁₀ alkyl. In some embodiments of the compound of Formula (II), (II-a), (II-b), (II-c), (II-d), or (II-e), R′^{branched} is:

[chemical structure]

### and R′^{b} is:

[chemical structure]

R^{aγ} is a C₂₋₆ alkyl, and R² and R³ are each a C₈ alkyl.

[0803] In some embodiments of the compound of Formula (II), (II-a), (II-b), (II-c), (II-d), or (II-e), R′^{branched} is:

[chemical structure]

### R′^{b} is:

[chemical structure]

and R^{aγ} and R^{bγ} are each a C₁₋₁₂ alkyl.

[0804] In some embodiments of the compound of Formula (II), (II-a), (II-b), (II-c), (II-d), or (II-e), R′^{branched} is:

[chemical structure]

### R′^{b} is:

[chemical structure]

and R^{aγ} and R^{bγ} are each a C₂₋₆ alkyl.

[0805] In some embodiments of the compound of Formula (II), (II-a), (II-b), (II-c), (II-d), or (II-e), m and l are each independently selected from 4, 5, and 6 and each R′ independently is a C₁₋₁₂ alkyl. In some embodiments of the compound of Formula (II), (II-a), (II-b), (II-c), (II-d), or (II-e), m and l are each 5 and each R′ independently is a C₂₋₅ alkyl.

[0806] In some embodiments of the compound of Formula (II), (II-a), (II-b), (II-c), (II-d), or (II-e), R′^{branched} is:

[chemical structure]

### R′^{b} is:

[chemical structure]

m and l are each independently selected from 4, 5, and 6, each R′ independently is a C₁₋₁₂ alkyl, and R^{aγ} and R^{bγ} are each a C₁₋₁₂ alkyl. In some embodiments of the compound of Formula (II), (II-a), (II-b), (II-c), (II-d), or (II-e), R′^{branched} is:

[chemical structure]

### R′^{b} is:

[chemical structure]

m and l are each 5, each R′ independently is a C₂₋₅ alkyl, and R^{aγ} and R^{bγ} are each a C₂₋₆ alkyl.

[0807] In some embodiments of the compound of Formula (II), (II-a), (II-b), (II-c), (II-d), or (II-e), R′^{branched} is:

[chemical structure]

### and R′^{b} is:

[chemical structure]

m and l are each independently selected from 4, 5, and 6, R′ is a C₁₋₁₂ alkyl, R^{aγ} is a C₁₋₁₂ alkyl and R² and R³ are each independently a C₆₋₁₀ alkyl. In some embodiments of the compound of Formula (II), (II-a), (II-b), (II-c), (II-d), or (II-e), R′^{branched} is:

[chemical structure]

### and R′^{b} is:

[chemical structure]

m and l are each 5, R′ is a C₂₋₅ alkyl, R^{aγ} is a C₂₋₆ alkyl, and R² and R³ are each a C₈ alkyl.

[0808] In some embodiments of the compound of Formula (II), (II-a), (II-b), (II-c), (II-d), or (II-e), R⁴ is

[chemical structure]

wherein R¹⁰ is NH(C₁₋₆ alkyl) and n2 is 2. In some embodiments of the compound of Formula (II), (II-a), (II-b), (II-c), (II-d), or (II-e), R⁴ is

[chemical structure]

wherein R¹⁰ is NH(CH₃) and n2 is 2.

[0809] In some embodiments of the compound of Formula (II), (II-a), (II-b), (II-c), (II-d), or (II-e), R′^{branched} is:

[chemical structure]

### R′^{b} is:

[chemical structure]

m and l are each independently selected from 4, 5, and 6, each R′ independently is a C₁₋₁₂ alkyl, R^{aγ} and R^{bγ} are each a C₁₋₁₂ alkyl, and R⁴ is

[chemical structure]

wherein R¹⁰ is NH(C₁₋₆ alkyl), and n2 is 2. In some embodiments of the compound of Formula (II), (II-a), (II-b), (II-c), (II-d), or (II-e), R′^{branched} is:

[chemical structure]

### R′^{b} is:

[chemical structure]

m and l are each 5, each R′ independently is a C₂₋₅ alkyl, R^{aγ} and R^{bγ} are each a C₂₋₆ alkyl, and R⁴ is

[chemical structure]

wherein R¹⁰ is NH(CH₃) and n2 is 2.

[0810] In some embodiments of the compound of Formula (II), (II-a), (II-b), (II-c), (II-d), or (II-e), R′^{branched} is:

[chemical structure]

### and R′^{b} is:

[chemical structure]

m and l are each independently selected from 4, 5, and 6, R′ is a C₁₋₁₂ alkyl, R² and R³ are each independently a C₆₋₁₀ alkyl, R^{aγ} is a C₁₋₁₂ alkyl, and R⁴ is

[chemical structure]

wherein R¹⁰ is NH(C₁₋₆ alkyl) and n2 is 2. In some embodiments of the compound of Formula (II), (II-a), (II-b), (II-c), (II-d), or (II-e), R′^{branched} is:

[chemical structure]

### and R′^{b} is:

[chemical structure]

m and l are each 5, R′ is a C₂₋₅ alkyl, R^{aγ} is a C₂₋₆ alkyl, R² and R³ are each a C₈ alkyl, and R⁴ is

[chemical structure]

wherein R¹⁰ is NH(CH₃) and n2 is 2.

[0811] In some embodiments of the compound of Formula (II), (II-a), (II-b), (II-c), (II-d), or (II-e), R⁴ is —(CH₂)ₙOH and n is 2, 3, or 4. In some embodiments of the compound of Formula (II), (II-a), (II-b), (II-c), (II-d), or (II-e), R⁴ is —(CH₂)ₙOH and n is 2.

[0812] In some embodiments of the compound of Formula (II), (II-a), (II-b), (II-c), (II-d), or (II-e), R′^{branched} is:

[chemical structure]

### R′^{b} is:

[chemical structure]

m and l are each independently selected from 4, 5, and 6, each R′ independently is a C₁₋₁₂ alkyl, R^{aγ} and R^{bγ} are each a C₁₋₁₂ alkyl, R⁴ is —(CH₂)ₙOH, and n is 2, 3, or 4. In some embodiments of the compound of Formula (II), (II-a), (II-b), (II-c), (II-d), or (II-e), R′^{branched} is:

[chemical structure]

### R′^{b} is:

[chemical structure]

m and l are each 5, each R′ independently is a C₂₋₅ alkyl, R^{aγ} and R^{bγ} are each a C₂₋₆ alkyl, R⁴ is —(CH₂)ₙOH, and n is 2.

[0813] In some aspects, the disclosure relates to a compound of Formula (II-f):

[chemical structure]

or its N-oxide, or a salt or isomer thereof,
[0814] wherein R′^{a} is R′^{branched} or R′^{cyclic}; wherein
[0815] R′^{branched} is:

[chemical structure]

and R′^{b} is:

[chemical structure]

[0816] wherein

[chemical structure]

denotes a point of attachment;
[0817] R^{aγ} is a C₁₋₁₂ alkyl;
[0818] R² and R³ are each independently a C₁₋₁₄ alkyl;
[0819] R⁴ is —(CH₂)ₙOH wherein n is selected from the group consisting of 1, 2, 3, 4, and 5;
[0820] R′ is a C₁₋₁₂ alkyl;
[0821] m is selected from 4, 5, and 6; and
[0822] l is selected from 4, 5, and 6.

[0823] In some embodiments of the compound of Formula (II-f), m and l are each 5, and n is 2, 3, or 4.

[0824] In some embodiments of the compound of Formula (II-f) R′ is a C₂₋₅ alkyl, R^{aγ} is a C₂₋₆ alkyl, and R² and R³ are each a C₆₋₁₀ alkyl.

[0825] In some embodiments of the compound of Formula (II-f), m and l are each 5, n is 2, 3, or 4, R′ is a C₂₋₅ alkyl, R^{aγ} is a C₂₋₆ alkyl, and R² and R³ are each a C₆₋₁₀ alkyl.

[0826] In some aspects, the disclosure relates to a compound of Formula (II-g):

[chemical structure]

wherein
[0827] R^{aγ} is a C₂₋₆ alkyl;
[0828] R′ is a C₂₋₅ alkyl; and
[0829] R⁴ is selected from the group consisting of —(CH₂)ₙOH wherein n is selected from the group consisting of 3, 4, and 5, and

[chemical structure]

[0830] wherein

[chemical structure]

denotes a point of attachment, R¹⁰ is NH(C₁₋₆ alkyl), and n2 is selected from the group consisting of 1, 2, and 3.

[0831] In some aspects, the disclosure relates to a compound of Formula (II-h):

[chemical structure]

wherein
[0832] R^{aγ} and R^{bγ} are each independently a C₂₋₆ alkyl;
[0833] each R′ independently is a C₂₋₅ alkyl; and
[0834] R⁴ is selected from the group consisting of —(CH₂)ₙOH wherein n is selected from the group consisting of 3, 4, and 5, and

[chemical structure]

[0835] wherein

[chemical structure]

denotes a point of attachment, R¹⁰ is NH(C₁₋₆ alkyl), and n2 is selected from the group consisting of 1, 2, and 3.

[0836] In some embodiments of the compound of Formula (II-g) or (II-h), R⁴ is

[chemical structure]

wherein
[0837] R¹⁰ is NH(CH₃) and n2 is 2.

[0838] In some embodiments of the compound of Formula (II-g) or (II-h), R⁴ is —(CH₂)₂OH.

[0839] In some aspects, the disclosure relates to a compound having the Formula (III):

[chemical structure]

[0840] or a salt or isomer thereof, wherein
[0841] R¹, R², R³, R⁴, and R⁵ are independently selected from the group consisting of C₅₋₂₀ alkyl, C₅₋₂₀ alkenyl, —R″MR′, —R*YR″, —YR″, and —R*OR″;
[0842] each M is independently selected from the group consisting
[0843] of —C(O)O—, —OC(O)—, —OC(O)O—, —C(O)N(R′)—, —N(R′)C(O)—, —C(O)—, —C(S)—, —C(S)S—, —SC(S)—, —CH(OH)—, —P(O)(OR′)O—, —S(O)₂—, an aryl group, and a heteroaryl group;
[0844] X¹, X², and X³ are independently selected from the group consisting of a bond, —CH₂—, —(CH₂)₂—, —CHR—, —CHY—, —C(O)—, —C(O)O—, —OC(O)—, —C(O)—CH₂—, —CH₂—C(O)—, —C(O)O—CH₂—, —OC(O)—CH₂—, —CH₂—C(O)O—, —CH₂—OC(O)—, —CH(OH)—, —C(S)—, and —CH(SH)—;
[0845] each Y is independently a C₃₋₆ carbocycle;
[0846] each R* is independently selected from the group consisting of C₁₋₁₂ alkyl and C₂₋₁₂ alkenyl;
[0847] each R is independently selected from the group consisting of C₁₋₃ alkyl and a C₃₋₆ carbocycle;
[0848] each R′ is independently selected from the group consisting of C₁₋₁₂ alkyl, C₂₋₁₂ alkenyl, and H; and
[0849] each R″ is independently selected from the group consisting of C₃₋₁₂ alkyl and C₃₋₁₂ alkenyl, and
[0850] wherein:
[0851] i) at least one of X¹, X², and X³ is not —CH₂—; and/or
[0852] ii) at least one of R¹, R², R³, R⁴, and R⁵ is —R″MR′.

[0853] In some embodiments, R¹, R², R³, R⁴, and R⁵ are each C₅₋₂₀ alkyl; X¹ is —CH₂—; and X² and X³ are each —C(O)—.

[0854] In some embodiments, the compound of Formula (III) is:

[chemical structure]

[0855] The central amine moiety of a lipid according to any of the Formulae herein, e.g. a compound having any of Formula (I), (I-a), (I-b), (I-c), (II), (II-a), (II-b), (II-c), (II-d), (II-e), (II-f), (II-g), (II-h), or (III) (each of these preceded by the letter I for clarity) may be protonated at a physiological pH. Thus, a lipid may have a positive or partial positive charge at physiological pH. Such lipids may be referred to as cationic or ionizable (amino)lipids. Lipids may also be zwitterionic, i.e., neutral molecules having both a positive and a negative charge.

[0856] In some embodiments, the amount the ionizable amino lipid of the invention, e.g. a compound having any of Formula (I), (I-a), (I-b), (I-c), (II), (II-a), (II-b), (II-c), (II-d), (II-e), (II-f), (II-g), (II-h), or (III) (each of these preceded by the letter I for clarity) ranges from about 1 mol % to 99 mol % in the lipid composition.

[0857] In one embodiment, the amount of the ionizable amino lipid of the invention, e.g. a compound having any of Formula (I), (I-a), (I-b), (I-c), (II), (II-a), (II-b), (II-c), (II-d), (II-e), (II-f), (II-g), (II-h), or (III) (each of these preceded by the letter I for clarity) is at least about 1, 2, 3, 4, 5, 6, 7, 8, 9, 10, 11, 12, 13, 14, 15, 16, 17, 18, 19, 20, 21, 22, 23, 24, 25, 26, 27, 28, 29, 30, 31, 32, 33, 34, 35, 36, 37, 38, 39, 40, 41, 42, 43, 44, 45, 46, 47, 48, 49, 50, 51, 52, 53, 54, 55, 56, 57, 58, 59, 60, 61, 62, 63, 64, 65, 66, 67, 68, 69, 70, 71, 72, 73, 74, 75, 76, 77, 78, 79, 80, 81, 82, 83, 84, 85, 86, 87, 88, 89, 90, 91, 92, 93, 94, 95, 96, 97, 98, or 99 mol % in the lipid composition.

[0858] In one embodiment, the amount of the ionizable amino lipid of the invention, e.g. a compound having any of Formula (I), (I-a), (I-b), (I-c), (II), (II-a), (II-b), (II-c), (II-d), (II-e), (II-f), (II-g), (II-h), or (III) (each of these preceded by the letter I for clarity) ranges from about 30 mol % to about 70 mol %, from about 35 mol % to about 65 mol %, from about 40 mol % to about 60 mol %, and from about 45 mol % to about 55 mol % in the lipid composition.

[0859] In one specific embodiment, the amount of the ionizable amino lipid of the invention, e.g. a compound having any of Formula (I), (I-a), (I-b), (I-c), (II), (II-a), (II-b), (II-c), (II-d), (II-e), (II-f), (II-g), (II-h), or (III) (each of these preceded by the letter I for clarity) is about 45 mol % in the lipid composition.

[0860] In one specific embodiment, the amount of the ionizable amino lipid of the invention, e.g. a compound having any of Formula (I), (I-a), (I-b), (I-c), (II), (II-a), (II-b), (II-c), (II-d), (II-e), (II-f), (II-g), (II-h), or (III) (each of these preceded by the letter I for clarity) is about 40 mol % in the lipid composition.

[0861] In one specific embodiment, the amount of the ionizable amino lipid of the invention, e.g. a compound having any of Formula (I), (I-a), (I-b), (I-c), (II), (II-a), (II-b), (II-c), (II-d), (II-e), (II-f), (II-g), (II-h), or (III) (each of these preceded by the letter I for clarity) is about 50 mol % in the lipid composition.

[0862] In addition to the ionizable amino lipid disclosed herein, e.g. a compound having any of Formula (I), (I-a), (I-b), (I-c), (II), (II-a), (II-b), (II-c), (II-d), (II-e), (II-f), (II-g), (II-h), or (III), (each of these preceded by the letter I for clarity) the lipid-based composition (e.g., lipid nanoparticle) disclosed herein can comprise additional components such as cholesterol and/or cholesterol analogs, non-cationic helper lipids, structural lipids, PEG-lipids, and any combination thereof.

[0863] Additional ionizable lipids of the invention can be selected from the non-limiting group consisting of 3-(didodecylamino)-N1,N1,4-tridodecyl-1-piperazineethanamine (KL10), N1-[2-(didodecylamino)ethyl]-N1,N4,N4-tridodecyl-1,4-piperazinediethanamine (KL22), 14,25-ditridecyl-15,18,21,24-tetraaza-octatriacontane (KL25), 1,2-dilinoleyloxy-N,N-dimethylaminopropane (DLin-DMA), 2,2-dilinoleyl-4-dimethylaminomethyl-[1,3]-dioxolane (DLin-K-DMA), heptatriaconta-6,9,28,31-tetraen-19-yl 4-(dimethylamino)butanoate (DLin-MC3-DMA), 2,2-dilinoleyl-4-(2-dimethylaminoethyl)-[1,3]-dioxolane (DLin-KC2-DMA), 1,2-dioleyloxy-N,N-dimethylaminopropane (DODMA), (13Z,165Z)—N,N-dimethyl-3-nonydocosa-13-16-dien-1-amine (L608), 2-({8-[(3β)-cholest-5-en-3-yloxy]octyl}oxy)-N,N-dimethyl-3-[(9Z,12Z)-octadeca-9,12-dien-1-yl oxy]propan-1-amine (Octyl-CLinDMA), (2R)-2-({8-[(3β)-cholest-5-en-3-yloxy]octyl}oxy)-N,N-dimethyl-3-[(9Z,12Z)-octadeca-9,12-die n-1-yloxy]propan-1-amine (Octyl-CLinDMA (2R)), and (2S)-2-({8-[(3β)-cholest-5-en-3-yloxy]octyl}oxy)-N,N-dimethyl-3-[(9Z,12Z)-octadeca-9,12-dien-1-yloxy]propan-1-amine (Octyl-CLinDMA (2S)). In addition to these, an ionizable amino lipid can also be a lipid including a cyclic amine group.

[0864] Ionizable lipids of the invention can also be the compounds disclosed in International Publication No. WO 2017/075531 A1, hereby incorporated by reference in its entirety.

[0865] Ionizable lipids of the invention can also be the compounds disclosed in International Publication No. WO 2015/199952 A1, hereby incorporated by reference in its entirety.

[0866] In any of the foregoing or related aspects, the ionizable lipid of the LNP of the disclosure comprises a compound included in any e.g. a compound having any of Formula (I), (I-a), (I-b), (I-c), (II), (II-a), (II-b), (II-c), (II-d), (II-e), (II-f), (II-g), (II-h), or (III) (each of these preceded by the letter I for clarity).

[0867] In any of the foregoing or related aspects, the ionizable lipid of the LNP of the disclosure comprises a compound comprising any of Compound Nos. 18, 25, 301, and 357.

[0868] In any of the foregoing or related aspects, the ionizable lipid of the LNP of the disclosure comprises at least one compound selected from the group consisting of: Compound Nos. 18, 25, 301, and 357. In another embodiment, the ionizable lipid of the LNP of the disclosure comprises a compound selected from the group consisting of. Compound Nos. 18, 25, 301, and 357. In another embodiment, the ionizable lipid of the LNP of the disclosure comprises Compound 18. In another embodiment, the ionizable lipid of the LNP of the disclosure comprises Compound 25.

[0869] In any of the foregoing or related aspects, the synthesis of compounds of the invention, e.g. compounds comprising any of Compound Nos. 18, 25, 301, and 357, follows the synthetic descriptions in U.S. Provisional Patent Application No. 62/733,315, filed Sep. 19, 2018.

### Representative Synthetic Routes:

[0870] Compound I-182: Heptadecan-9-yl 8-((3-((2-(methylamino)-3,4-dioxocyclobut-1-en-1-yl)amino)propyl)(8-(nonyloxy)-8-oxooctyl)amino)octanoate 3-Methoxy-4-(methylamino)cyclobut-3-ene-1,2-dione

[chemical structure]

[0871] To a solution of 3,4-dimethoxy-3-cyclobutene-1,2-dione (1 g, 7 mmol) in 100 mL diethyl ether was added a 2M methylamine solution in THF (3.8 mL, 7.6 mmol) and a precipitate formed. The mixture was stirred at room temperature for 24 hours, then filtered to collect the solid. The solid was washed with diethyl ether and air-dried, then dissolved in hot EtOAc and filtered. The filtrate was allowed to cool to room temperature, then cooled to 0° C. to afford a precipitate that was isolated via filtration, washed with cold EtOAc, air-dried, then dried under vacuum to yield 3-methoxy-4-(methylamino)cyclobut-3-ene-1,2-dione (0.70 g, 5 mmol, 73%) as a solid. ¹H NMR (300 MHz, DMSO-d₆) δ: ppm 8.50 (br. d, 1H, J=69 Hz); 4.27 (s, 3H); 3.02 (sdd, 3H, J=42 Hz, 4.5 Hz).

### Heptadecan-9-yl 8-((3-((2-(methylamino)-3,4-dioxocyclobut-1-en-1-yl)amino)propyl)(8-(nonyloxy)-8-oxooctyl)amino)octanoate

[chemical structure]

[0872] To a solution of heptadecan-9-yl 8-((3-aminopropyl)(8-(nonyloxy)-8-oxooctyl)amino)octanoate (200 mg, 0.28 mmol) in 10 mL ethanol was added 3-methoxy-4-(methylamino)cyclobut-3-ene-1,2-dione (39 mg, 0.28 mmol). The reaction mixture stirred at room temperature for 20 hours, then concentrated in vacuo to yield a residue. The residue was purified by silica gel chromatography (0-100% (mixture of 1% NH₄OH, 20% MeOH in dichloromethane) in dichloromethane) to give heptadecan-9-yl 8-((3-((2-(methylamino)-3,4-dioxocyclobut-1-en-1-yl)amino)propyl)(8-(nonyloxy)-8-oxooctyl)amino)octanoate (138 mg, 0.17 mmol, 60%) as a solid. UPLC/ELSD: RT=3. min. MS (ES): m/z (MH⁺) 833.4 for C₅₁H₉₅N₃O₆. ¹H NMR (300 MHz, CDCl₃) δ: ppm 7.86 (br. s., 1H); 4.86 (quint., 1H, J=6 Hz); 4.05 (t, 2H, J=6 Hz); 3.92 (d, 2H, J=3 Hz); 3.20 (s, 6H); 2.63 (br. s, 2H); 2.42 (br. s, 3H); 2.28 (m, 4H); 1.74 (br. s, 2H); 1.61 (m, 8H); 1.50 (m, 5H); 1.41 (m, 3H); 1.25 (br. m, 47H); 0.88 (t, 9H, J=7.5 Hz).

### Compound I-301: Heptadecan-9-yl 8-((3-((2-(methylamino)-3,4-dioxocyclobut-1-en-1-yl)amino)propyl)(8-oxo-8-(undecan-3-yloxy)octyl)amino)octanoate

[chemical structure]

[0873] Compound I-301 was prepared analogously to compound 182 except that heptadecan-9-yl 8-((3-aminopropyl)(8-oxo-8-(undecan-3-yloxy)octyl)amino)octanoate (500 mg, 0.66 mmol) was used instead of heptadecan-9-yl 8-((3-aminopropyl)(8-(nonyloxy)-8-oxooctyl)amino)octanoate. Following an aqueous workup, the residue was purified by silica gel chromatography (0-50% (mixture of 1% NH₄OH, 20% MeOH in dichloromethane) in dichloromethane) to give heptadecan-9-yl 8-((3-((2-(methylamino)-3,4-dioxocyclobut-1-en-1-yl)amino)propyl)(8-oxo-8-(undecan-3-yloxy)octyl)amino)octanoate (180 mg, 32%) as a solid. HPLC/UV (254 nm): RT=6.77 min. MS (CI): m/z (MH⁺) 860.7 for C₅₂H₉₇N₃O₆. ¹H NMR (300 MHz, CDCl₃): δ ppm 4.86-4.79 (m, 2H); 3.66 (bs, 2H); 3.25 (d, 3H, J=4.9 Hz); 2.56-2.52 (m, 2H); 2.42-2.37 (m, 4H); 2.28 (dd, 4H, J=2.7 Hz, 7.4 Hz); 1.78-1.68 (m, 3H); 1.64-1.50 (m, 16H); 1.48-1.38 (m, 6H); 1.32-1.18 (m, 43H); 0.88-0.84 (m, 12H).

### Cholesterol/Structural Lipids

[0874] The LNP described herein comprises one or more structural lipids.

[0875] As used herein, the term “structural lipid” refers to sterols and also to lipids containing sterol moieties. Incorporation of structural lipids in the lipid nanoparticle may help mitigate aggregation of other lipids in the particle. Structural lipids can include, but are not limited to, cholesterol, fecosterol, ergosterol, bassicasterol, tomatidine, tomatine, ursolic, alpha-tocopherol, and mixtures thereof. In certain embodiments, the structural lipid is cholesterol. In certain embodiments, the structural lipid includes cholesterol and a corticosteroid (such as, for example, prednisolone, dexamethasone, prednisone, and hydrocortisone), or a combination thereof.

[0876] In some embodiments, the structural lipid is a sterol. As defined herein, “sterols” are a subgroup of steroids consisting of steroid alcohols. In certain embodiments, the structural lipid is a steroid. In certain embodiments, the structural lipid is cholesterol. In certain embodiments, the structural lipid is an analog of cholesterol. In certain embodiments, the structural lipid is alpha-tocopherol. Examples of structural lipids include, but are not limited to, the following:

[chemical structure]

[0877] The target cell target cell delivery LNPs described herein comprises one or more structural lipids.

[0878] As used herein, the term “structural lipid” refers to sterols and also to lipids containing sterol moieties. Incorporation of structural lipids in the lipid nanoparticle may help mitigate aggregation of other lipids in the particle. In certain embodiments, the structural lipid includes cholesterol. In another embodiment, the structural lipid can comprise cholesterol and another molecule. and a corticosteroid (such as, for example, prednisolone, dexamethasone, prednisone, and hydrocortisone), or a combination thereof.

[0879] In some embodiments, the structural lipid is a sterol. As defined herein, “sterols” are a subgroup of steroids consisting of steroid alcohols. Structural lipids can include, but are not limited to, sterols (e.g., phytosterols or zoosterols).

[0880] In certain embodiments, the structural lipid is cholesterol. In certain embodiments, the structural lipid is an analog of cholesterol.

### Non-Cationic Helper Lipids/Phospholipids

[0881] In some embodiments, the lipid-based composition (e.g., LNP) described herein comprises one or more non-cationic helper lipids. In some embodiments, the non-cationic helper lipid is a phospholipid. In some embodiments, the non-cationic helper lipid is a phospholipid substitute or replacement.

[0882] As used herein, the term “non-cationic helper lipid” refers to a lipid comprising at least one fatty acid chain of at least 8 carbons in length and at least one polar head group moiety. In one embodiment, the helper lipid is not a phosphatidyl choline (PC). In one embodiment the non-cationic helper lipid is a phospholipid or a phospholipid substitute. In some embodiments, the phospholipid or phospholipid substitute can be, for example, one or more saturated or (poly)unsaturated phospholipids, or phospholipid substitutes, or a combination thereof. In general, phospholipids comprise a phospholipid moiety and one or more fatty acid moieties.

[0883] A phospholipid moiety can be selected, for example, from the non-limiting group consisting of phosphatidyl choline, phosphatidyl ethanolamine, phosphatidyl glycerol, phosphatidyl serine, phosphatidic acid, 2-lysophosphatidyl choline, and a sphingomyelin.

[0884] A fatty acid moiety can be selected, for example, from the non-limiting group consisting of lauric acid, myristic acid, myristoleic acid, palmitic acid, palmitoleic acid, stearic acid, oleic acid, linoleic acid, alpha-linolenic acid, erucic acid, phytanoic acid, arachidic acid, arachidonic acid, eicosapentaenoic acid, behenic acid, docosapentaenoic acid, and docosahexaenoic acid.

[0885] Phospholipids include, but are not limited to, glycerophospholipids such as phosphatidylcholines, phosphatidylethanolamines, phosphatidylserines, phosphatidylinositols, phosphatidy glycerols, and phosphatidic acids. Phospholipids also include phosphosphingolipid, such as sphingomyelin.

[0886] In some embodiments, the non-cationic helper lipid is a DSPC analog, a DSPC substitute, oleic acid, or an oleic acid analog.

[0887] In some embodiments, a non-cationic helper lipid is a non-phosphatidyl choline (PC) zwitterionic lipid, a DSPC analog, oleic acid, an oleic acid analog, or a 1,2-distearoyl-i77-glycero-3-phosphocholine (DSPC) substitute.

### Phospholipids

### Phospholipids

[0888] The lipid composition of the lipid nanoparticle composition disclosed herein can comprise one or more phospholipids, for example, one or more saturated or (poly)unsaturated phospholipids or a combination thereof. In general, phospholipids comprise a phospholipid moiety and one or more fatty acid moieties.

[0889] A phospholipid moiety can be selected, for example, from the non-limiting group consisting of phosphatidyl choline, phosphatidyl ethanolamine, phosphatidyl glycerol, phosphatidyl serine, phosphatidic acid, 2-lysophosphatidyl choline, and a sphingomyelin.

[0890] A fatty acid moiety can be selected, for example, from the non-limiting group consisting of lauric acid, myristic acid, myristoleic acid, palmitic acid, palmitoleic acid, stearic acid, oleic acid, linoleic acid, alpha-linolenic acid, erucic acid, phytanoic acid, arachidic acid, arachidonic acid, eicosapentaenoic acid, behenic acid, docosapentaenoic acid, and docosahexaenoic acid.

[0891] Particular phospholipids can facilitate fusion to a membrane. For example, a cationic phospholipid can interact with one or more negatively charged phospholipids of a membrane (e.g., a cellular or intracellular membrane). Fusion of a phospholipid to a membrane can allow one or more elements (e.g., a therapeutic agent) of a lipid-containing composition (e.g., LNPs) to pass through the membrane permitting, e.g., delivery of the one or more elements to a target tissue.

[0892] Non-natural phospholipid species including natural species with modifications and substitutions including branching, oxidation, cyclization, and alkynes are also contemplated. For example, a phospholipid can be functionalized with or cross-linked to one or more alkynes (e.g., an alkenyl group in which one or more double bonds is replaced with a triple bond). Under appropriate reaction conditions, an alkyne group can undergo a copper-catalyzed cycloaddition upon exposure to an azide. Such reactions can be useful in functionalizing a lipid bilayer of a nanoparticle composition to facilitate membrane permeation or cellular recognition or in conjugating a nanoparticle composition to a useful component such as a targeting or imaging moiety (e.g., a dye).

[0893] Phospholipids include, but are not limited to, glycerophospholipids such as phosphatidylcholines, phosphatidylethanolamines, phosphatidylserines, phosphatidylinositols, phosphatidy glycerols, and phosphatidic acids. Phospholipids also include phosphosphingolipid, such as sphingomyelin.

[0894] In some embodiments, a phospholipid of the invention comprises 1,2-distearoyl-sn-glycero-3-phosphocholine (DSPC), 1,2-dioleoyl-sn-glycero-3-phosphoethanolamine (DOPE), 1,2-dilinoleoyl-sn-glycero-3-phosphocholine (DLPC), 1,2-dimyristoyl-sn-gly cero-phosphocholine (DMPC), 1,2-dioleoyl-sn-glycero-3-phosphocholine (DOPC), 1,2-dipalmitoyl-sn-glycero-3-phosphocholine (DPPC), 1,2-diundecanoyl-sn-glycero-phosphocholine (DUPC), 1-palmitoyl-2-oleoyl-sn-glycero-3-phosphocholine (POPC), 1,2-di-O-octadecenyl-sn-glycero-3-phosphocholine (18:0 Diether PC), 1-oleoyl-2 cholesterylhemisuccinoyl-sn-glycero-3-phosphocholine (OChemsPC), 1-hexadecyl-sn-glycero-3-phosphocholine (C16 Lyso PC), 1,2-dilinolenoyl-sn-glycero-3-phosphocholine, 1,2-diarachidonoyl-sn-glycero-3-phosphocholine, 1,2-didocosahexaenoyl-sn-glycero-3-phosphocholine, 1,2-diphytanoyl-sn-glycero-3-phosphoethanolamine (ME 16.0 PE), 1,2-distearoyl-sn-glycero-3-phosphoethanolamine, 1,2-dilinoleoyl-sn-glycero-3-phosphoethanolamine, 1,2-dilinolenoyl-sn-glycero-3-phosphoethanolamine, 1,2-diarachidonoyl-sn-glycero-3-phosphoethanolamine, 1,2-didocosahexaenoyl-sn-glycero-3-phosphoethanolamine, 1,2-dioleoyl-sn-glycero-3-phospho-rac-(1-glycerol) sodium salt (DOPG), sphingomyelin, and mixtures thereof.

[0895] In certain embodiments, a phospholipid useful or potentially useful in the present invention is an analog or variant of DSPC. In certain embodiments, a phospholipid useful or potentially useful in the present invention is a compound of Formula (IV):

[chemical structure]

or a salt thereof, wherein:
[0896] each R¹ is independently optionally substituted alkyl; or optionally two R¹ are joined together with the intervening atoms to form optionally substituted monocyclic carbocyclyl or optionally substituted monocyclic heterocyclyl; or optionally three R¹ are joined together with the intervening atoms to form optionally substituted bicyclic carbocyclyl or optionally substitute bicyclic heterocyclyl;
[0897] n is 1, 2, 3, 4, 5, 6, 7, 8, 9, or 10;
[0898] m is 0, 1, 2, 3, 4, 5, 6, 7, 8, 9, or 10;
[0899] A is of the Formula:

[chemical structure]

[0900] each instance of L² is independently a bond or optionally substituted C₁₋₆ alkylene, wherein one methylene unit of the optionally substituted C₁₋₆ alkylene is optionally replaced with O, N(R^{N}), S, C(O), C(O)N(R^{N}), NR^{N}C(O), C(O)O, OC(O), OC(O)O, OC(O)N(R^{N}), NR^{N}C(O)O or NR^{N}C(O)N(R^{N});
[0901] each instance of R² is independently optionally substituted C₁₋₃₀ alkyl, optionally substituted C₁₋₃₀ alkenyl, or optionally substituted C₁₋₃₀ alkynyl; optionally wherein one or more methylene units of R² are independently replaced with optionally substituted carbocyclylene, optionally substituted heterocyclylene, optionally substituted arylene, optionally substituted heteroarylene, N(R^{N}), O, S, C(O), C(O)N(R^{N}), NR^{N}C(O), NR^{N}C(O)N(R^{N}) C(O)O, OC(O), —OC(O)O, OC(O)N(R^{N}), NR^{N}C(O)O, C(O)S, SC(O), C(═NR^{N}), C(═NR^{N})N(R^{N}), NR^{N}C(═NR^{N}) NR^{N}C(═NR^{N})N(R^{N}), C(S), C(S)N(R^{N}), NR^{N}C(S), NR^{N}C(S)N(R^{N}) S(O), OS(O), S(O)O, —OS(O)O, OS(O)₂, S(O)₂O, OS(O)₂O, N(R^{N})S(O), S(O)N(R^{N}), N(R^{N})S(O)N(R^{N}), OS(O)N(R^{N}), N(R^{N})S(O)O, S(O)₂, N(R^{N})S(O)₂, S(O)₂N(R^{N}), N(R^{N})S(O)₂N(R^{N}), OS(O)₂N(R^{N}), or —N(R^{N})S(O)₂O;
[0902] each instance of R^{N} is independently hydrogen, optionally substituted alkyl, or a nitrogen protecting group;
[0903] Ring B is optionally substituted carbocyclyl, optionally substituted heterocyclyl, optionally substituted aryl, or optionally substituted heteroaryl; and
[0904] p is 1 or 2;
[0905] provided that the compound is not of the Formula:

[chemical structure]

[0906] wherein each instance of R² is independently unsubstituted alkyl, unsubstituted alkenyl, or unsubstituted alkynyl.

[0907] In some embodiments, the phospholipids may be one or more of the phospholipids described in U.S. Application No. 62/520,530.

### Phospholipid Head Modifications

[0908] In certain embodiments, a phospholipid useful or potentially useful in the present invention comprises a modified phospholipid head (e.g., a modified choline group). In certain embodiments, a phospholipid with a modified head is DSPC, or analog thereof, with a modified quaternary amine. For example, in embodiments of Formula (IV), at least one of R¹ is not methyl. In certain embodiments, at least one of R¹ is not hydrogen or methyl. In certain embodiments the compound of Formula (IV) is of one of the following Formulae:

[chemical structure]

or a salt thereof, wherein:
[0909] each t is independently 1, 2, 3, 4, 5, 6, 7, 8, 9, or 10;
[0910] each u is independently 0, 1, 2, 3, 4, 5, 6, 7, 8, 9, or 10; and
[0911] each v is independently 1, 2, or 3.

[0912] In certain embodiments, a compound of Formula (IV) is of Formula (IV-a):

[chemical structure]

or a salt thereof.

[0913] In certain embodiments, a phospholipid useful or potentially useful in the present invention comprises a cyclic moiety in place of the glyceride moiety. In certain embodiments, a phospholipid useful in the present invention is DSPC, or analog thereof, with a cyclic moiety in place of the glyceride moiety. In certain embodiments, the compound of Formula (IV) is of Formula (IV-b):

[chemical structure]

or a salt thereof.

### Phospholipid Tail Modifications

[0914] In certain embodiments, a phospholipid useful or potentially useful in the present invention comprises a modified tail. In certain embodiments, a phospholipid useful or potentially useful in the present invention is DSPC, or analog thereof, with a modified tail. As described herein, a “modified tail” may be a tail with shorter or longer aliphatic chains, aliphatic chains with branching introduced, aliphatic chains with substituents introduced, aliphatic chains wherein one or more methylenes are replaced by cyclic or heteroatom groups, or any combination thereof. For example, in certain embodiments, the compound of (IV) is of Formula (IV-a), or a salt thereof, wherein at least one instance of R² is each instance of R² is optionally substituted C₁₋₃₀ alkyl, wherein one or more methylene units of R² are independently replaced with optionally substituted carbocyclylene, optionally substituted heterocyclylene, optionally substituted arylene, optionally substituted heteroarylene, N(R^{N}), O, S, C(O), C(O)N(R^{N}), —NR^{N}C(O), NR^{N}C(O)N(R^{N}), C(O)O, OC(O), OC(O)O, OC(O)N(R^{N}), NR^{N}C(O)O C(O)S, SC(O), C(═NR^{N}), C(═NR^{N})N(R^{N}), NR^{N}C(═NR^{N}), NR^{N}C(═NR^{N})N(R^{N}), C(S), C(S)N(R^{N}), NR^{N}C(S), —NR^{N}C(S)N(R^{N}), S(O), OS(O), S(O)O, OS(O)O, OS(O)₂, S(O)₂O, OS(O)₂O, N(R^{N})S(O), —S(O)N(R^{N}), N(R^{N})S(O)N(R^{N}), OS(O)N(R^{N}), N(R^{N})S(O)O, S(O)₂, N(R^{N})S(O)₂, S(O)₂N(R^{N}), —N(R^{N})S(O)₂N(R^{N}), OS(O)₂N(R^{N}), or N(R^{N})S(O)₂O.

[0915] In certain embodiments, the compound of Formula (IV) is of Formula (IV-c):

[chemical structure]

or a salt thereof, wherein:
[0916] each x is independently an integer between 0-30, inclusive; and
[0917] each instance is G is independently selected from the group consisting of optionally substituted carbocyclylene, optionally substituted heterocyclylene, optionally substituted arylene, optionally substituted heteroarylene, N(R^{N}), O, S, C(O), C(O)N(R^{N}), NR^{N}C(O), NR^{N}C(O)N(R^{N}) C(O)O, OC(O), OC(O)O, OC(O)N(R^{N}), NR^{N}C(O)O, C(O)S, SC(O), C(═NR^{N}), C(═NR^{N})N(R^{N}), NR^{N}C(═NR^{N}) NR^{N}C(═NR^{N})N(R^{N}), C(S), C(S)N(R^{N}), NR^{N}C(S), NR^{N}C(S)N(R^{N}) S(O), OS(O), S(O)O, OS(O)O, OS(O)₂, S(O)₂O, OS(O)₂O, N(R^{N})S(O), S(O)N(R^{N}), N(R^{N})S(O)N(R^{N}), —OS(O)N(R^{N}), N(R^{N})S(O)O, S(O)₂, N(R^{N})S(O)₂, S(O)₂N(R^{N}), N(R^{N})S(O)₂N(R^{N}), OS(O)₂N(R^{N}), or N(R^{N})S(O)₂O. Each possibility represents a separate embodiment of the present invention.

[0918] In certain embodiments, a phospholipid useful or potentially useful in the present invention comprises a modified phosphocholine moiety, wherein the alkyl chain linking the quaternary amine to the phosphoryl group is not ethylene (e.g., n is not 2). Therefore, in certain embodiments, a phospholipid useful or potentially useful in the present invention is a compound of Formula (IV), wherein n is 1, 3, 4, 5, 6, 7, 8, 9, or 10. For example, in certain embodiments, a compound of Formula (IV) is of one of the following Formulae:

[chemical structure]

or a salt thereof.

### Alternative Lipids

[0919] In certain embodiments, a phospholipid useful or potentially useful in the present invention comprises a modified phosphocholine moiety, wherein the alkyl chain linking the quaternary amine to the phosphoryl group is not ethylene (e.g., n is not 2). Therefore, in certain embodiments, a phospholipid useful.

[0920] In certain embodiments, an alternative lipid is used in place of a phospholipid of the present disclosure.

[0921] In certain embodiments, an alternative lipid of the invention is oleic acid.

[0922] In certain embodiments, the alternative lipid is one of the following.

[chemical structure]

### PEG Lipids

[0923] The lipid composition of a pharmaceutical composition disclosed herein can comprise one or more a polyethylene glycol (PEG) lipid.

[0924] As used herein, the term “PEG-lipid” refers to polyethylene glycol (PEG)-modified lipids. Non-limiting examples of PEG-lipids include PEG-modified phosphatidylethanolamine and phosphatidic acid, PEG-ceramide conjugates (e.g., PEG-CerC14 or PEG-CerC20), PEG-modified dialkylamines and PEG-modified 1,2-diacyloxypropan-3-amines. Such lipids are also referred to as PEGylated lipids. For example, a PEG lipid can be PEG-c-DOMG, PEG-DMG, PEG-DLPE, PEG-DMPE, PEG-DPPC, or a PEG-DSPE lipid.

[0925] In some embodiments, the PEG-lipid includes, but not limited to 1,2-dimyristoyl-sn-glycerol methoxypolyethylene glycol (PEG-DMG), 1,2-distearoyl-sn-glycero-3-phosphoethanolamine-N-[amino(polyethylene glycol)] (PEG-DSPE), PEG-disteryl glycerol (PEG-DSG), PEG-dipalmetoleyl, PEG-dioleyl, PEG-distearyl, PEG-diacylglycamide (PEG-DAG), PEG-dipalmitoyl phosphatidylethanolamine (PEG-DPPE), or PEG-1,2-dimyristyloxlpropyl-3-amine (PEG-c-DMA).

[0926] In one embodiment, the PEG-lipid is selected from the group consisting of a PEG-modified phosphatidylethanolamine, a PEG-modified phosphatidic acid, a PEG-modified ceramide, a PEG-modified dialkylamine, a PEG-modified diacylglycerol, a PEG-modified dialkylglycerol, and mixtures thereof.

[0927] In some embodiments, the lipid moiety of the PEG-lipids includes those having lengths of from about C₁₄ to about C₂₂, preferably from about C₁₄ to about C₁₆. In some embodiments, a PEG moiety, for example a mPEG-NH₂, has a size of about 1000, 2000, 5000, 10,000, 15,000 or 20,000 daltons. In one embodiment, the PEG-lipid is PEG₂ₖ-DMG.

[0928] In one embodiment, the lipid nanoparticles described herein can comprise a PEG lipid which is a non-diffusible PEG. Non-limiting examples of non-diffusible PEGs include PEG-DSG and PEG-DSPE.

[0929] PEG-lipids are known in the art, such as those described in U.S. Pat. No. 8,158,601 and International Publ. No. WO 2015/130584 A2, which are incorporated herein by reference in their entirety.

[0930] In general, some of the other lipid components (e.g., PEG lipids) of various Formulae, described herein may be synthesized as described International Patent Application No. PCT/US2016/000129, filed Dec. 10, 2016, entitled “Compositions and Methods for Delivery of Therapeutic Agents,” which is incorporated by reference in its entirety.

[0931] The lipid component of a lipid nanoparticle composition may include one or more molecules comprising polyethylene glycol, such as PEG or PEG-modified lipids. Such species may be alternately referred to as PEGylated lipids. A PEG lipid is a lipid modified with polyethylene glycol. A PEG lipid may be selected from the non-limiting group including PEG-modified phosphatidylethanolamines, PEG-modified phosphatidic acids, PEG-modified ceramides, PEG-modified dialkylamines, PEG-modified diacylglycerols, PEG-modified dialkylglycerols, and mixtures thereof. For example, a PEG lipid may be PEG-c-DOMG, PEG-DMG, PEG-DLPE, PEG-DMPE, PEG-DPPC, or a PEG-DSPE lipid.

[0932] In some embodiments the PEG-modified lipids are a modified form of PEG DMG. PEG-DMG has the following structure:

[chemical structure]

[0933] In one embodiment, PEG lipids useful in the present invention can be PEGylated lipids described in International Publication No. WO2012099755, the contents of which is herein incorporated by reference in its entirety. Any of these exemplary PEG lipids described herein may be modified to comprise a hydroxyl group on the PEG chain. In certain embodiments, the PEG lipid is a PEG-OH lipid. As generally defined herein, a “PEG-OH lipid” (also referred to herein as “hydroxy-PEGylated lipid”) is a PEGylated lipid having one or more hydroxyl (—OH) groups on the lipid. In certain embodiments, the PEG-OH lipid includes one or more hydroxyl groups on the PEG chain. In certain embodiments, a PEG-OH or hydroxy-PEGylated lipid comprises an —OH group at the terminus of the PEG chain. Each possibility represents a separate embodiment of the present invention.

[0934] In certain embodiments, a PEG lipid useful in the present invention is a compound of Formula (V). Provided herein are compounds of Formula (V):

[chemical structure]

or salts thereof, wherein:
[0935] R³ is —OR^{O};
[0936] R^{O} is hydrogen, optionally substituted alkyl, or an oxygen protecting group;
[0937] r is an integer between 1 and 100, inclusive;
[0938] L¹ is optionally substituted C₁₋₁₀ alkylene, wherein at least one methylene of the optionally substituted C₁₋₁₀ alkylene is independently replaced with optionally substituted carbocyclylene, optionally substituted heterocyclylene, optionally substituted arylene, optionally substituted heteroarylene, O, N(R^{N}), S, C(O), C(O)N(R^{N}), NR^{N}C(O) C(O)O, OC(O), OC(O)O, OC(O)N(R^{N}), NR^{N}C(O)O, or NR^{N}C(O)N(R^{N});
[0939] D is a moiety obtained by click chemistry or a moiety cleavable under physiological conditions;
[0940] m is 0, 1, 2, 3, 4, 5, 6, 7, 8, 9, or 10;
[0941] A is of the Formula:

[chemical structure]

[0942] each instance of L² is independently a bond or optionally substituted C₁₋₆ alkylene, wherein one methylene unit of the optionally substituted C₁₋₆ alkylene is optionally replaced with O, N(R^{N}), S, C(O), C(O)N(R^{N}), NR^{N}C(O), C(O)O, OC(O), OC(O)O, OC(O)N(R^{N}), NR^{N}C(O)O or NR^{N}C(O)N(R^{N});
[0943] each instance of R² is independently optionally substituted C₁₋₃₀ alkyl, optionally substituted C₁₋₃₀ alkenyl, or optionally substituted C₁₋₃₀ alkynyl; optionally wherein one or more methylene units of R² are independently replaced with optionally substituted carbocyclylene, optionally substituted heterocyclylene, optionally substituted arylene, optionally substituted heteroarylene, N(R^{N}), O, S, C(O), C(O)N(R^{N}), NR^{N}C(O), NR^{N}C(O)N(R^{N}) C(O)O, OC(O), —OC(O)O, OC(O)N(R^{N}), NR^{N}C(O)O, C(O)S, SC(O), C(═NR^{N}), C(═NR^{N})N(R^{N}), NR^{N}C(═NR^{N}) NR^{N}C(═NR^{N})N(R^{N}), C(S), C(S)N(R^{N}), NR^{N}C(S), NR^{N}C(S)N(R^{N}) S(O), OS(O), S(O)O, —OS(O)O, OS(O)₂, S(O)₂O, OS(O)₂O, N(R^{N})S(O), S(O)N(R^{N}), N(R^{N})S(O)N(R^{N}), OS(O)N(R^{N}), N(R^{N})S(O)O, S(O)₂, N(R^{N})S(O)₂, S(O)₂N(R^{N}), N(R^{N})S(O)₂N(R^{N}), OS(O)₂N(R^{N}), or —N(R^{N})S(O)₂O;
[0944] each instance of R^{N} is independently hydrogen, optionally substituted alkyl, or a nitrogen protecting group;
[0945] Ring B is optionally substituted carbocyclyl, optionally substituted heterocyclyl, optionally substituted aryl, or optionally substituted heteroaryl; and
[0946] p is 1 or 2.

[0947] In certain embodiments, the compound of Formula (V) is a PEG-OH lipid (i.e., R³ is —OR^{O}, and R^{O} is hydrogen). In certain embodiments, the compound of Formula (V) is of Formula (V-OH):

[chemical structure]

or a salt thereof.

[0948] In certain embodiments, a PEG lipid useful in the present invention is a PEGylated fatty acid. In certain embodiments, a PEG lipid useful in the present invention is a compound of Formula (VI). Provided herein are compounds of Formula (VI):

[chemical structure]

or a salt thereof, wherein:
[0949] R³ is-OR^{O};
[0950] R^{O} is hydrogen, optionally substituted alkyl or an oxygen protecting group;
[0951] r is an integer between 1 and 100, inclusive;
[0952] R⁵ is optionally substituted C₁₀₋₄₀ alkyl, optionally substituted C₁₀₋₄₀ alkenyl, or optionally substituted C₁₀₋₄₀ alkynyl; and optionally one or more methylene groups of R⁵ are replaced with optionally substituted carbocyclylene, optionally substituted heterocyclylene, optionally substituted arylene, optionally substituted heteroarylene, N(R^{N}), O, S, C(O), C(O)N(R^{N}), —NR^{N}C(O), NR^{N}C(O)N(R^{N}), C(O)O, OC(O), OC(O)O, OC(O)N(R^{N}), NC(O)O C(O)S, SC(O), C(═NR^{N}), C(═NR^{N})N(R^{N}), NR^{N}C(═NR^{N}), NR^{N}C(═NR^{N})N(R^{N}), C(S), C(S)N(R^{N}), NR^{N}C(S), —NR^{N}C(S)N(R^{N}), S(O), OS(O), S(O)O, OS(O)O, OS(O)₂, S(O)₂O, OS(O)₂O, N(R^{N})S(O), —S(O)N(R^{N}), N(R^{N})S(O)N(R^{N}), OS(O)N(R^{N}), N(R^{N})S(O)O, S(O)₂, N(R^{N})S(O)₂, S(O)₂N(R^{N}), —N(R^{N})S(O)₂N(R^{N}), OS(O)₂N(R^{N}), or N(R^{N})S(O)₂O; and
[0953] each instance of R^{N} is independently hydrogen, optionally substituted alkyl, or a nitrogen protecting group.

[0954] In certain embodiments, the compound of Formula (VI) is of Formula (VI-OH).

[chemical structure]

[0955] or a salt thereof. In some embodiments, r is 45. In another of the foregoing or related aspects, a PEG lipid of the invention is featured wherein r is 40-50.

[0956] In yet other embodiments the compound of Formula (VI) is:

[chemical structure]

or a salt thereof.

[0957] In one embodiment, the compound of Formula (VI) is

[chemical structure]

[0958] In some aspects, the lipid composition of the pharmaceutical compositions disclosed herein does not comprise a PEG-lipid.

[0959] In some embodiments, the PEG-lipids may be one or more of the PEG lipids described in U.S. Application No. 62/520,530.

[0960] In some embodiments, a PEG lipid of the invention comprises a PEG-modified phosphatidylethanolamine, a PEG-modified phosphatidic acid, a PEG-modified ceramide, a PEG-modified dialkylamine, a PEG-modified diacylglycerol, a PEG-modified dialkylglycerol, and mixtures thereof. In some embodiments, the PEG-modified lipid is PEG-DMG, PEG-c-DOMG (also referred to as PEG-DOMG), PEG-DSG and/or PEG-DPG.

[0961] The LNPs provided herein, in certain embodiments, exhibit increased PEG shedding compared to existing LNP formulations comprising PEG lipids. “PEG shedding,” as used herein, refers to the cleavage of a PEG group from a PEG lipid. In many instances, cleavage of a PEG group from a PEG lipid occurs through serum-driven esterase-cleavage or hydrolysis. The PEG lipids provided herein, in certain embodiments, have been designed to control the rate of PEG shedding. In certain embodiments, an LNP provided herein exhibits greater than 5%, 10%, 15%, 20%, 25%, 30%, 35%, 40%, 45%, 50%, 55%, 60%, 65%, 70%, 75%, 80%, 85%, 90%, 95%, or 98% PEG shedding after about 6 hours in human serum In certain embodiments, an LNP provided herein exhibits greater than 50% PEG shedding after about 6 hours in human serum. In certain embodiments, an LNP provided herein exhibits greater than 60% PEG shedding after about 6 hours in human serum. In certain embodiments, an LNP provided herein exhibits greater than 70% PEG shedding after about 6 hours in human serum. In certain embodiments, the LNP exhibits greater than 80% PEG shedding after about 6 hours in human serum. In certain embodiments, the LNP exhibits greater than 90% PEG shedding after about 6 hours in human serum. In certain embodiments, an LNP provided herein exhibits greater than 90% PEG shedding after about 6 hours in human serum.

[0962] In other embodiments, an LNP provided herein exhibits less than 5%, 10%, 15%, 20%, 25%, 30%, 35%, 40%, 45%, 50%, 55%, 60%, 65%, 70%, 75%, 80%, 85%, 90%, 95%, or 98% PEG shedding after about 6 hours in human serum In certain embodiments, an LNP provided herein exhibits less than 60% PEG shedding after about 6 hours in human serum. In certain embodiments, an LNP provided herein exhibits less than 70% PEG shedding after about 6 hours in human serum. In certain embodiments, an LNP provided herein exhibits less than 80% PEG shedding after about 6 hours in human serum.

[0963] In addition to the PEG lipids provided herein, the LNP may comprise one or more additional lipid components. In certain embodiments, the PEG lipids are present in the LNP in a molar ratio of 0.15-15% with respect to other lipids. In certain embodiments, the PEG lipids are present in a molar ratio of 0.15-5% with respect to other lipids. In certain embodiments, the PEG lipids are present in a molar ratio of 1-5% with respect to other lipids. In certain embodiments, the PEG lipids are present in a molar ratio of 0.15-2% with respect to other lipids. In certain embodiments, the PEG lipids are present in a molar ratio of 1-2% with respect to other lipids. In certain embodiments, the PEG lipids are present in a molar ratio of approximately 1%, 1.1%, 1.2%, 1.3%, 1.4%, 1.5%, 1.6%, 1.7%, 1.8%, 1.9%, or 2% with respect to other lipids. In certain embodiments, the PEG lipids are present in a molar ratio of approximately 1.5% with respect to other lipids.

[0964] In one embodiment, the amount of PEG-lipid in the lipid composition of a pharmaceutical composition disclosed herein ranges from about 0.1 mol % to about 5 mol %, from about 0.5 mol % to about 5 mol %, from about 1 mol % to about 5 mol %, from about 1.5 mol % to about 5 mol %, from about 2 mol % to about 5 mol %, from about 0.1 mol % to about 4 mol %, from about 0.5 mol % to about 4 mol %, from about 1 mol % to about 4 mol %, from about 1.5 mol % to about 4 mol %, from about 2 mol % to about 4 mol %, from about 0.1 mol % to about 3 mol %, from about 0.5 mol % to about 3 mol %, from about 1 mol % to about 3 mol %, from about 1.5 mol % to about 3 mol %, from about 2 mol % to about 3 mol %, from about 0.1 mol % to about 2 mol %, from about 0.5 mol % to about 2 mol %, from about 1 mol % to about 2 mol %, from about 1.5 mol % to about 2 mol %, from about 0.1 mol % to about 1.5 mol %, from about 0.5 mol % to about 1.5 mol %, or from about 1 mol % to about 1.5 mol %.

[0965] In one embodiment, the amount of PEG-lipid in the lipid composition disclosed herein is about 2 mol %. In one embodiment, the amount of PEG-lipid in the lipid composition disclosed herein is about 1.5 mol %.

[0966] In one embodiment, the amount of PEG-lipid in the lipid composition disclosed herein is at least about 0.1, 0.2, 0.3, 0.4, 0.5, 0.6, 0.7, 0.8, 0.9, 1, 1.1, 1.2, 1.3, 1.4, 1.5, 1.6, 1.7, 1.8, 1.9, 2, 2.1, 2.2, 2.3, 2.4, 2.5, 2.6, 2.7, 2.8, 2.9, 3, 3.1, 3.2, 3.3, 3.4, 3.5, 3.6, 3.7, 3.8, 3.9, 4, 4.1, 4.2, 4.3, 4.4, 4.5, 4.6, 4.7, 4.8, 4.9, or 5 mol %.

### Exemplary Synthesis

### Compound: HO-PEG₂₀₀₀-Ester-C18

[chemical structure]

[0967] To a nitrogen filled flask containing palladium on carbon (10 wt. %, 74 mg, 0.070 mmol) was added Benzyl-PEG₂₀₀₀-ester-C18 (822 mg, 0.35 mmol) and MeOH (20 mL). The flask was evacuated and backfilled with H₂ three times, and allowed to stir at RT and 1 atm H₂ for 12 hours. The mixture was filtered through celite, rinsing with DCM, and the filtrate was concentrated in vacuo to provide the desired product (692 mg, 88%). Using this methodology n=40-50. In one embodiment, n of the resulting polydispersed mixture is referred to by the average, 45.

[0968] For example, the value of r can be determined on the basis of a molecular weight of the PEG moiety within the PEG lipid. For example, a molecular weight of 2,000 (e.g., PEG2000) corresponds to a value of n of approximately 45. For a given composition, the value for n can connote a distribution of values within an art-accepted range, since polymers are often found as a distribution of different polymer chain lengths. For example, a skilled artisan understanding the polydispersity of such polymeric compositions would appreciate that an n value of 45 (e.g., in a structural formula) can represent a distribution of values between 40-50 in an actual PEG-containing composition, e.g., a DMG PEG200 peg lipid composition.

[0969] In some aspects, a target cell delivery lipid of the pharmaceutical compositions disclosed herein does not comprise a PEG-lipid.

[0970] In one embodiment, a target cell target cell delivery LNP of the disclosure comprises a PEG-lipid. In one embodiment, the PEG lipid is not PEG DMG. In some aspects, the PEG-lipid is selected from the group consisting of a PEG-modified phosphatidylethanolamine, a PEG-modified phosphatidic acid, a PEG-modified ceramide, a PEG-modified dialkylamine, a PEG-modified diacylglycerol, a PEG-modified dialkylglycerol, and mixtures thereof. In some aspects, the PEG lipid is selected from the group consisting of PEG-c-DOMG, PEG-DMG, PEG-DLPE, PEG-DMPE, PEG-DPPC and PEG-DSPE lipid. In other aspects, the PEG-lipid is PEG-DMG.

[0971] In one embodiment, a target cell target cell delivery LNP of the disclosure comprises a PEG-lipid which has a chain length longer than about 14 or than about 10, if branched.

[0972] As used herein, the term “alkyl”, “alkyl group”, or “alkylene” means a linear or branched, saturated hydrocarbon including one or more carbon atoms (e.g., one, two, three, four, five, six, seven, eight, nine, ten, eleven, twelve, thirteen, fourteen, fifteen, sixteen, seventeen, eighteen, nineteen, twenty, or more carbon atoms), which is optionally substituted. The notation “C₁₋₁₄ alkyl” means an optionally substituted linear or branched, saturated hydrocarbon including 1-14 carbon atoms. Unless otherwise specified, an alkyl group described herein refers to both unsubstituted and substituted alkyl groups.

[0973] As used herein, the term “alkenyl”, “alkenyl group”, or “alkenylene” means a linear or branched hydrocarbon including two or more carbon atoms (e.g., two, three, four, five, six, seven, eight, nine, ten, eleven, twelve, thirteen, fourteen, fifteen, sixteen, seventeen, eighteen, nineteen, twenty, or more carbon atoms) and at least one double bond, which is optionally substituted. The notation “C₂₋₁₄ alkenyl” means an optionally substituted linear or branched hydrocarbon including 2-14 carbon atoms and at least one carbon-carbon double bond. An alkenyl group may include one, two, three, four, or more carbon-carbon double bonds. For example, C₁₈ alkenyl may include one or more double bonds. A C₁₈ alkenyl group including two double bonds may be a linoleyl group. Unless otherwise specified, an alkenyl group described herein refers to both unsubstituted and substituted alkenyl groups.

[0974] As used herein, the term “alkynyl”, “alkynyl group”, or “alkynylene” means a linear or branched hydrocarbon including two or more carbon atoms (e.g., two, three, four, five, six, seven, eight, nine, ten, eleven, twelve, thirteen, fourteen, fifteen, sixteen, seventeen, eighteen, nineteen, twenty, or more carbon atoms) and at least one carbon-carbon triple bond, which is optionally substituted. The notation “C₂₋₁₄ alkynyl” means an optionally substituted linear or branched hydrocarbon including 2-14 carbon atoms and at least one carbon-carbon triple bond. An alkynyl group may include one, two, three, four, or more carbon-carbon triple bonds. For example, C₁₈ alkynyl may include one or more carbon-carbon triple bonds. Unless otherwise specified, an alkynyl group described herein refers to both unsubstituted and substituted alkynyl groups.

[0975] As used herein, the term “carbocycle” or “carbocyclic group” means an optionally substituted mono- or multi-cyclic system including one or more rings of carbon atoms. Rings may be three, four, five, six, seven, eight, nine, ten, eleven, twelve, thirteen, fourteen, fifteen, sixteen, seventeen, eighteen, nineteen, or twenty membered rings. The notation “C₃₋₆ carbocycle” means a carbocycle including a single ring having 3-6 carbon atoms. Carbocycles may include one or more carbon-carbon double or triple bonds and may be non-aromatic or aromatic (e.g., cycloalkyl or aryl groups). Examples of carbocycles include cyclopropyl, cyclopentyl, cyclohexyl, phenyl, naphthyl, and 1,2 dihydronaphthyl groups. The term “cycloalkyl” as used herein means a non-aromatic carbocycle and may or may not include any double or triple bond. Unless otherwise specified, carbocycles described herein refers to both unsubstituted and substituted carbocycle groups, i.e., optionally substituted carbocycles.

[0976] As used herein, the term “heterocycle” or “heterocyclic group” means an optionally substituted mono- or multi-cyclic system including one or more rings, where at least one ring includes at least one heteroatom. Heteroatoms may be, for example, nitrogen, oxygen, or sulfur atoms. Rings may be three, four, five, six, seven, eight, nine, ten, eleven, twelve, thirteen, or fourteen membered rings. Heterocycles may include one or more double or triple bonds and may be non-aromatic or aromatic (e.g., heterocycloalkyl or heteroaryl groups). Examples of heterocycles include imidazolyl, imidazolidinyl, oxazolyl, oxazolidinyl, thiazolyl, thiazolidinyl, pyrazolidinyl, pyrazolyl, isoxazolidinyl, isoxazolyl, isothiazolidinyl, isothiazolyl, morpholinyl, pyrrolyl, pyrrolidinyl, furyl, tetrahydrofuryl, thiophenyl, pyridinyl, piperidinyl, quinolyl, and isoquinolyl groups. The term “heterocycloalkyl” as used herein means a non-aromatic heterocycle and may or may not include any double or triple bond. Unless otherwise specified, heterocycles described herein refers to both unsubstituted and substituted heterocycle groups, i.e., optionally substituted heterocycles.

[0977] As used herein, the term “heteroalkyl”, “heteroalkenyl”, or “heteroalkynyl”, refers respectively to an alkyl, alkenyl, alkynyl group, as defined herein, which further comprises one or more (e.g., 1, 2, 3, or 4) heteroatoms (e.g., oxygen, sulfur, nitrogen, boron, silicon, phosphorus) wherein the one or more heteroatoms is inserted between adjacent carbon atoms within the parent carbon chain and/or one or more heteroatoms is inserted between a carbon atom and the parent molecule, i.e., between the point of attachment. Unless otherwise specified, heteroalkyls, heteroalkenyls, or heteroalkynyls described herein refers to both unsubstituted and substituted heteroalkyls, heteroalkenyls, or heteroalkynyls, i.e., optionally substituted heteroalkyls, heteroalkenyls, or heteroalkynyls.

[0978] As used herein, a “biodegradable group” is a group that may facilitate faster metabolism of a lipid in a mammalian entity. A biodegradable group may be selected from the group consisting of, but is not limited to, —C(O)O—, —OC(O)—, —C(O)N(R′)—, —N(R′)C(O)—, —C(O)—, —C(S)—, —C(S)S—, —SC(S)—, —CH(OH)—, —P(O)(OR′)O—, —S(O)₂—, an aryl group, and a heteroaryl group. As used herein, an “aryl group” is an optionally substituted carbocyclic group including one or more aromatic rings. Examples of aryl groups include phenyl and naphthyl groups. As used herein, a “heteroaryl group” is an optionally substituted heterocyclic group including one or more aromatic rings. Examples of heteroaryl groups include pyrrolyl, furyl, thiophenyl, imidazolyl, oxazolyl, and thiazolyl. Both aryl and heteroaryl groups may be optionally substituted. For example, M and M′ can be selected from the non-limiting group consisting of optionally substituted phenyl, oxazole, and thiazole. In the Formulas herein, M and M′ can be independently selected from the list of biodegradable groups above. Unless otherwise specified, aryl or heteroaryl groups described herein refers to both unsubstituted and substituted groups, i.e., optionally substituted aryl or heteroaryl groups.

[0979] Alkyl, alkenyl, and cyclyl (e.g., carbocyclyl and heterocyclyl) groups may be optionally substituted unless otherwise specified. Optional substituents may be selected from the group consisting of, but are not limited to, a halogen atom (e.g., a chloride, bromide, fluoride, or iodide group), a carboxylic acid (e.g., C(O)OH), an alcohol (e.g., a hydroxyl, OH), an ester (e.g., C(O)OR OC(O)R), an aldehyde (e.g., C(O)H), a carbonyl (e.g., C(O)R, alternatively represented by C═O), an acyl halide (e.g., C(O)X, in which X is a halide selected from bromide, fluoride, chloride, and iodide), a carbonate (e.g., OC(O)OR), an alkoxy (e.g., OR), an acetal (e.g., C(OR)₂R″″, in which each OR are alkoxy groups that can be the same or different and R″″ is an alkyl or alkenyl group), a phosphate (e.g., P(O)₄³⁻), a thiol (e.g., SH), a sulfoxide (e.g., S(O)R), a sulfinic acid (e.g., S(O)OH), a sulfonic acid (e.g., S(O)₂OH), a thial (e.g., C(S)H), a sulfate (e.g., S(O)₄²⁻), a sulfonyl (e.g., S(O)₂), an amide (e.g., C(O)NR₂, or N(R)C(O)R), an azido (e.g., N₃), a nitro (e.g., NO₂), a cyano (e.g., CN), an isocyano (e.g., NC), an acyloxy (e.g., OC(O)R), an amino (e.g., NR₂, NRH, or NH₂), a carbamoyl (e.g., OC(O)NR₂, OC(O)NRH, or OC(O)NH₂), a sulfonamide (e.g., S(O)₂NR₂, S(O)₂NRH, S(O)₂NH₂, N(R)S(O)₂R, N(H)S(O)₂R, N(R)S(O)₂H, or N(H)S(O)₂H), an alkyl group, an alkenyl group, and a cyclyl (e.g., carbocyclyl or heterocyclyl) group. In any of the preceding, R is an alkyl or alkenyl group, as defined herein. In some embodiments, the substituent groups themselves may be further substituted with, for example, one, two, three, four, five, or six substituents as defined herein. For example, a C₁₋₆ alkyl group may be further substituted with one, two, three, four, five, or six substituents as described herein.

[0980] Compounds of the disclosure that contain nitrogens can be converted to N-oxides by treatment with an oxidizing agent (e.g., 3-chloroperoxybenzoic acid (mCPBA) and/or hydrogen peroxides) to afford other compounds of the disclosure. Thus, all shown and claimed nitrogen-containing compounds are considered, when allowed by valency and structure, to include both the compound as shown and its N-oxide derivative (which can be designated as N→O or N+—O—). Furthermore, in other instances, the nitrogens in the compounds of the disclosure can be converted to N-hydroxy or N-alkoxy compounds. For example, N-hydroxy compounds can be prepared by oxidation of the parent amine by an oxidizing agent such as m CPBA. All shown and claimed nitrogen-containing compounds are also considered, when allowed by valency and structure, to cover both the compound as shown and its N-hydroxy (i.e., N—OH) and N-alkoxy (i.e., N—OR, wherein R is substituted or unsubstituted C₁-C₆ alkyl, C₁-C₆ alkenyl, C₁-C₆ alkynyl, 3-14-membered carbocycle or 3-14-membered heterocycle) derivatives.

### Exemplary Additional LNP Components

[0981] The lipid composition of a pharmaceutical composition disclosed herein can include one or more components in addition to those described above. For example, the lipid composition can include one or more permeability enhancer molecules, carbohydrates, polymers, surface altering agents (e.g., surfactants), or other components. For example, a permeability enhancer molecule can be a molecule described by U.S. Patent Application Publication No. 2005/0222064. Carbohydrates can include simple sugars (e.g., glucose) and polysaccharides (e.g., glycogen and derivatives and analogs thereof).

[0982] A polymer can be included in and/or used to encapsulate or partially encapsulate a pharmaceutical composition disclosed herein (e.g., a pharmaceutical composition in lipid nanoparticle form). A polymer can be biodegradable and/or biocompatible. A polymer can be selected from, but is not limited to, polyamines, polyethers, polyamides, polyesters, polycarbamates, polyureas, polycarbonates, polystyrenes, polyimides, polysulfones, polyurethanes, polyacetylenes, polyethylenes, polyethyleneimines, polyisocyanates, polyacrylates, polymethacrylates, polyacrylonitriles, and polyarylates.

### LNPs Comprising Polynucleotides Encoding ITB6 Molecules

[0983] Disclosed herein are, inter alia, LNP compositions comprising polynucleotides encoding ITB6 polypeptides for use in suppressing T cells, for treating a disease associated with an aberrant T cell function, or for inhibiting an immune response in a subject. In another embodiment, the invention pertains to LNPs comprising a polynucleotide comprising an mRNA encoding an ITB6 molecule. The LNP compositions of the present disclosure can be used to reprogram dendritic cells, suppress T cells and/or induce immune tolerance in vivo or ex vivo.

[0984] In an aspect, an LNP composition comprising a polynucleotide encoding ITB6, comprises: (i) an ionizable lipid, e.g., an amino lipid; (ii) a sterol or other structural lipid; (iii) a non-cationic helper lipid or phospholipid; and (iv) a PEG-lipid.

[0985] In an aspect, an LNP composition comprising a polynucleotide encoding ITB6, comprises: (i) an ionizable lipid, e.g., an amino lipid; (ii) a sterol or other structural lipid; (iii) a non-cationic helper lipid or phospholipid; and (iv) a PEG-lipid.

[0986] In another aspect, the LNP compositions of the disclosure are used in a method of treating a disease associated with an aberrant T cell function in a subject or a method of inhibiting an immune response in a subject, e.g., as described herein.

[0987] In an aspect, an LNP composition comprising a polynucleotide encoding an ITB6 molecule, can be administered with an additional agent, e.g., as described herein.

### Nanoparticle Compositions

[0988] In some embodiments, the pharmaceutical compositions disclosed herein are Formulated as lipid nanoparticles (LNP). Accordingly, the present disclosure also provides nanoparticle compositions comprising (i) a lipid composition comprising a delivery agent such as compound as described herein, and (ii) a polynucleotide encoding a polypeptide of the invention. In such nanoparticle composition, the lipid composition disclosed herein can encapsulate the polynucleotide encoding a polypeptide of the invention.

[0989] Nanoparticle compositions are typically sized on the order of micrometers or smaller and can include a lipid bilayer. Nanoparticle compositions encompass lipid nanoparticles (LNPs), liposomes (e.g., lipid vesicles), and lipoplexes. For example, a nanoparticle composition can be a liposome having a lipid bilayer with a diameter of 500 nm or less.

[0990] Nanoparticle compositions include, for example, lipid nanoparticles (LNPs), liposomes, and lipoplexes. In some embodiments, nanoparticle compositions are vesicles including one or more lipid bilayers. In certain embodiments, a nanoparticle composition includes two or more concentric bilayers separated by aqueous compartments. Lipid bilayers can be functionalized and/or crosslinked to one another. Lipid bilayers can include one or more ligands, proteins, or channels.

[0991] In one embodiment, a lipid nanoparticle comprises an ionizable amino lipid, a structural lipid, a phospholipid, and mRNA. In some embodiments, the LNP comprises an ionizable amino lipid, a PEG-modified lipid, a sterol and a structural lipid. In some embodiments, the LNP has a molar ratio of about 40-50% ionizable amino lipid; about 5-15% structural lipid; about 30-45% sterol; and about 1-5% PEG-modified lipid.

[0992] In some embodiments, the LNP has a polydispersity value of less than 0.4. In some embodiments, the LNP has a net neutral charge at a neutral pH. In some embodiments, the LNP has a mean diameter of 50-150 nm. In some embodiments, the LNP has a mean diameter of 80-100 nm.

[0993] As generally defined herein, the term “lipid” refers to a small molecule that has hydrophobic or amphiphilic properties. Lipids may be naturally occurring or synthetic. Examples of classes of lipids include, but are not limited to, fats, waxes, sterol-containing metabolites, vitamins, fatty acids, glycerolipids, glycerophospholipids, sphingolipids, saccharolipids, and polyketides, and prenol lipids. In some instances, the amphiphilic properties of some lipids leads them to form liposomes, vesicles, or membranes in aqueous media.

[0994] In some embodiments, a lipid nanoparticle (LNP) may comprise an ionizable amino lipid. As used herein, the term “ionizable amino lipid” has its ordinary meaning in the art and may refer to a lipid comprising one or more charged moieties. In some embodiments, an ionizable amino lipid may be positively charged or negatively charged. An ionizable amino lipid may be positively charged, in which case it can be referred to as “cationic lipid”. In certain embodiments, an ionizable amino lipid molecule may comprise an amine group, and can be referred to as an ionizable amino lipid. As used herein, a “charged moiety” is a chemical moiety that carries a formal electronic charge, e.g., monovalent (+1, or −1), divalent (+2, or −2), trivalent (+3, or −3), etc. The charged moiety may be anionic (i.e., negatively charged) or cationic (i.e., positively charged). Examples of positively-charged moieties include amine groups (e.g., primary, secondary, and/or tertiary amines), ammonium groups, pyridinium group, guanidine groups, and imidizolium groups. In a particular embodiment, the charged moieties comprise amine groups. Examples of negatively-charged groups or precursors thereof, include carboxylate groups, sulfonate groups, sulfate groups, phosphonate groups, phosphate groups, hydroxyl groups, and the like. The charge of the charged moiety may vary, in some cases, with the environmental conditions, for example, changes in pH may alter the charge of the moiety, and/or cause the moiety to become charged or uncharged. In general, the charge density of the molecule may be selected as desired.

[0995] It should be understood that the terms “charged” or “charged moiety” does not refer to a “partial negative charge” or “partial positive charge” on a molecule. The terms “partial negative charge” and “partial positive charge” are given its ordinary meaning in the art. A “partial negative charge” may result when a functional group comprises a bond that becomes polarized such that electron density is pulled toward one atom of the bond, creating a partial negative charge on the atom. Those of ordinary skill in the art will, in general, recognize bonds that can become polarized in this way.

[0996] The ionizable amino lipid is sometimes referred to in the art as an “ionizable cationic lipid”. In one embodiment, the ionizable amino lipid may have a positively charged hydrophilic head and a hydrophobic tail that are connected via a linker structure.

[0997] In addition to these, an ionizable amino lipid may also be a lipid including a cyclic amine group.

[0998] In one embodiment, the ionizable amino lipid may be selected from, but not limited to, an ionizable amino lipid described in International Publication Nos. WO2013086354 and WO2013116126; the contents of each of which are herein incorporated by reference in their entirety.

[0999] In yet another embodiment, the ionizable amino lipid may be selected from, but not limited to, Formula CLI-CLXXXXII of U.S. Pat. No. 7,404,969; each of which is herein incorporated by reference in their entirety.

[1000] In one embodiment, the lipid may be a cleavable lipid such as those described in International Publication No. WO2012170889, herein incorporated by reference in its entirety. In one embodiment, the lipid may be synthesized by methods known in the art and/or as described in International Publication Nos. WO2013086354; the contents of each of which are herein incorporated by reference in their entirety.

[1001] Nanoparticle compositions can be characterized by a variety of methods. For example, microscopy (e.g., transmission electron microscopy or scanning electron microscopy) can be used to examine the morphology and size distribution of a nanoparticle composition. Dynamic light scattering or potentiometry (e.g., potentiometric titrations) can be used to measure zeta potentials. Dynamic light scattering can also be utilized to determine particle sizes. Instruments such as the Zetasizer Nano ZS (Malvern Instruments Ltd, Malvern, Worcestershire, UK) can also be used to measure multiple characteristics of a nanoparticle composition, such as particle size, polydispersity index, and zeta potential.

[1002] The size of the nanoparticles can help counter biological reactions such as, but not limited to, inflammation, or can increase the biological effect of the polynucleotide.

[1003] As used herein, “size” or “mean size” in the context of nanoparticle compositions refers to the mean diameter of a nanoparticle composition.

[1004] In one embodiment, the polynucleotide encoding a polypeptide are Formulated in lipid nanoparticles having a diameter from about 10 to about 100 nm such as, but not limited to, about 10 to about 20 nm, about 10 to about 30 nm, about 10 to about 40 nm, about 10 to about 50 nm, about 10 to about 60 nm, about 10 to about 70 nm, about 10 to about 80 nm, about 10 to about 90 nm, about 20 to about 30 nm, about 20 to about 40 nm, about 20 to about 50 nm, about 20 to about 60 nm, about 20 to about 70 nm, about 20 to about 80 nm, about 20 to about 90 nm, about 20 to about 100 nm, about 30 to about 40 nm, about 30 to about 50 nm, about 30 to about 60 nm, about 30 to about 70 nm, about 30 to about 80 nm, about 30 to about 90 nm, about 30 to about 100 nm, about 40 to about 50 nm, about 40 to about 60 nm, about 40 to about 70 nm, about 40 to about 80 nm, about 40 to about 90 nm, about 40 to about 100 nm, about 50 to about 60 nm, about 50 to about 70 nm, about 50 to about 80 nm, about 50 to about 90 nm, about 50 to about 100 nm, about 60 to about 70 nm, about 60 to about 80 nm, about 60 to about 90 nm, about 60 to about 100 nm, about 70 to about 80 nm, about 70 to about 90 nm, about 70 to about 100 nm, about 80 to about 90 nm, about 80 to about 100 nm and/or about 90 to about 100 nm.

[1005] In one embodiment, the nanoparticles have a diameter from about 10 to 500 nm. In one embodiment, the nanoparticle has a diameter greater than 100 nm, greater than 150 nm, greater than 200 nm, greater than 250 nm, greater than 300 nm, greater than 350 nm, greater than 400 nm, greater than 450 nm, greater than 500 nm, greater than 550 nm, greater than 600 nm, greater than 650 nm, greater than 700 nm, greater than 750 nm, greater than 800 nm, greater than 850 nm, greater than 900 nm, greater than 950 nm or greater than 1000 nm.

[1006] In some embodiments, the largest dimension of a nanoparticle composition is 1 μm or shorter (e.g., 1 μm, 900 nm, 800 nm, 700 nm, 600 nm, 500 nm, 400 nm, 300 nm, 200 nm, 175 nm, 150 nm, 125 nm, 100 nm, 75 nm, 50 nm, or shorter).

[1007] A nanoparticle composition can be relatively homogenous. A polydispersity index can be used to indicate the homogeneity of a nanoparticle composition, e.g., the particle size distribution of the nanoparticle composition. A small (e.g., less than 0.3) polydispersity index generally indicates a narrow particle size distribution. A nanoparticle composition can have a polydispersity index from about 0 to about 0.25, such as 0.01, 0.02, 0.03, 0.04, 0.05, 0.06, 0.07, 0.08, 0.09, 0.10, 0.11, 0.12, 0.13, 0.14, 0.15, 0.16, 0.17, 0.18, 0.19, 0.20, 0.21, 0.22, 0.23, 0.24, or 0.25. In some embodiments, the polydispersity index of a nanoparticle composition disclosed herein can be from about 0.10 to about 0.20.

[1008] The zeta potential of a nanoparticle composition can be used to indicate the electro kinetic potential of the composition. For example, the zeta potential can describe the surface charge of a nanoparticle composition. Nanoparticle compositions with relatively low charges, positive or negative, are generally desirable, as more highly charged species can interact undesirably with cells, tissues, and other elements in the body. In some embodiments, the zeta potential of a nanoparticle composition disclosed herein can be from about −10 mV to about +20 mV, from about −10 mV to about +15 mV, from about 10 mV to about +10 mV, from about −10 mV to about +5 mV, from about −10 mV to about 0 mV, from about −10 mV to about −5 mV, from about −5 mV to about +20 mV, from about −5 mV to about +15 mV, from about −5 mV to about +10 mV, from about −5 mV to about +5 mV, from about −5 mV to about 0 mV, from about 0 mV to about +20 mV, from about 0 mV to about +15 mV, from about 0 mV to about +10 mV, from about 0 mV to about +5 mV, from about +5 mV to about +20 mV, from about +5 mV to about +15 mV, or from about +5 mV to about +10 mV.

[1009] In some embodiments, the zeta potential of the lipid nanoparticles can be from about 0 mV to about 100 mV, from about 0 mV to about 90 mV, from about 0 mV to about 80 mV, from about 0 mV to about 70 mV, from about 0 mV to about 60 mV, from about 0 mV to about 50 mV, from about 0 mV to about 40 mV, from about 0 mV to about 30 mV, from about 0 mV to about 20 mV, from about 0 mV to about 10 mV, from about 10 mV to about 100 mV, from about 10 mV to about 90 mV, from about 10 mV to about 80 mV, from about 10 mV to about 70 mV, from about 10 mV to about 60 mV, from about 10 mV to about 50 mV, from about 10 mV to about 40 mV, from about 10 mV to about 30 mV, from about 10 mV to about 20 mV, from about 20 mV to about 100 mV, from about 20 mV to about 90 mV, from about 20 mV to about 80 mV, from about 20 mV to about 70 mV, from about 20 mV to about 60 mV, from about 20 mV to about 50 mV, from about 20 mV to about 40 mV, from about 20 mV to about 30 mV, from about 30 mV to about 100 mV, from about 30 mV to about 90 mV, from about 30 mV to about 80 mV, from about 30 mV to about 70 mV, from about 30 mV to about 60 mV, from about 30 mV to about 50 mV, from about 30 mV to about 40 mV, from about 40 mV to about 100 mV, from about 40 mV to about 90 mV, from about 40 mV to about 80 mV, from about 40 mV to about 70 mV, from about 40 mV to about 60 mV, and from about 40 mV to about 50 mV. In some embodiments, the zeta potential of the lipid nanoparticles can be from about 10 mV to about 50 mV, from about 15 mV to about 45 mV, from about 20 mV to about 40 mV, and from about 25 mV to about 35 mV. In some embodiments, the zeta potential of the lipid nanoparticles can be about 10 mV, about 20 mV, about 30 mV, about 40 mV, about 50 mV, about 60 mV, about 70 mV, about 80 mV, about 90 mV, and about 100 mV.

[1010] The term “encapsulation efficiency” of a polynucleotide describes the amount of the polynucleotide that is encapsulated by or otherwise associated with a nanoparticle composition after preparation, relative to the initial amount provided. As used herein, “encapsulation” can refer to complete, substantial, or partial enclosure, confinement, surrounding, or encasement.

[1011] Encapsulation efficiency is desirably high (e.g., close to 100%). The encapsulation efficiency can be measured, for example, by comparing the amount of the polynucleotide in a solution containing the nanoparticle composition before and after breaking up the nanoparticle composition with one or more organic solvents or detergents.

[1012] Fluorescence can be used to measure the amount of free polynucleotide in a solution. For the nanoparticle compositions described herein, the encapsulation efficiency of a polynucleotide can be at least 50%, for example 50%, 55%, 60%, 65%, 70%, 75%, 80%, 85%, 90%, 91%, 92%, 93%, 94%, 95%, 96%, 97%, 98%, 99%, or 100%. In some embodiments, the encapsulation efficiency can be at least 80%. In certain embodiments, the encapsulation efficiency can be at least 90%.

[1013] The amount of a polynucleotide present in a pharmaceutical composition disclosed herein can depend on multiple factors such as the size of the polynucleotide, desired target and/or application, or other properties of the nanoparticle composition as well as on the properties of the polynucleotide.

[1014] For example, the amount of an mRNA useful in a nanoparticle composition can depend on the size (expressed as length, or molecular mass), sequence, and other characteristics of the mRNA. The relative amounts of a polynucleotide in a nanoparticle composition can also vary.

[1015] The relative amounts of the lipid composition and the polynucleotide present in a lipid nanoparticle composition of the present disclosure can be optimized according to considerations of efficacy and tolerability. For compositions including an mRNA as a polynucleotide, the N:P ratio can serve as a useful metric.

[1016] As the N:P ratio of a nanoparticle composition controls both expression and tolerability, nanoparticle compositions with low N:P ratios and strong expression are desirable. N:P ratios vary according to the ratio of lipids to RNA in a nanoparticle composition.

[1017] In general, a lower N:P ratio is preferred. The one or more RNA, lipids, and amounts thereof can be selected to provide an N:P ratio from about 2:1 to about 30:1, such as 2:1, 3:1, 4:1, 5:1, 6:1, 7:1, 8:1, 9:1, 10:1, 12:1, 14:1, 16:1, 18:1, 20:1, 22:1, 24:1, 26:1, 28:1, or 30:1. In certain embodiments, the N:P ratio can be from about 2:1 to about 8:1. In other embodiments, the N:P ratio is from about 5:1 to about 8:1. In certain embodiments, the N:P ratio is between 5:1 and 6:1. In one specific aspect, the N:P ratio is about is about 5.67:1.

[1018] In addition to providing nanoparticle compositions, the present disclosure also provides methods of producing lipid nanoparticles comprising encapsulating a polynucleotide. Such method comprises using any of the pharmaceutical compositions disclosed herein and producing lipid nanoparticles in accordance with methods of production of lipid nanoparticles known in the art. See, e.g., Wang et al. (2015) “Delivery of oligonucleotides with lipid nanoparticles” Adv. Drug Deliv. Rev. 87:68-80; Silva et al. (2015) “Delivery Systems for Biopharmaceuticals. Part I: Nanoparticles and Microparticles” Curr. Pharm. Technol. 16: 940-954; Naseri et al. (2015) “Solid Lipid Nanoparticles and Nanostructured Lipid Carriers: Structure, Preparation and Application” Adv. Pharm. Bull. 5:305-13; Silva et al. (2015) “Lipid nanoparticles for the delivery of biopharmaceuticals” Curr. Pharm. Biotechnol. 16:291-302, and references cited therein.

[1019] In some embodiments, the ratio between the lipid composition and the polynucleotide can be about 10:1, 11:1, 12:1, 13:1, 14:1, 15:1, 16:1, 17:1, 18:1, 19:1, 20:1, 21:1, 22:1, 23:1, 24:1, 25:1, 26:1, 27:1, 28:1, 29:1, 30:1, 31:1, 32:1, 33:1, 34:1, 35:1, 36:1, 37:1, 38:1, 39:1, 40:1, 41:1, 42:1, 43:1, 44:1, 45:1, 46:1, 47:1, 48:1, 49:1, 50:1, 51:1, 52:1, 53:1, 54:1, 55:1, 56:1, 57:1, 58:1, 59:1 or 60:1 (wt/wt). In some embodiments, the wt/wt ratio of the lipid composition to the polynucleotide encoding a therapeutic agent is about 20:1 or about 15:1.

[1020] In some embodiments, the pharmaceutical composition disclosed herein can contain more than one polypeptides. For example, a pharmaceutical composition disclosed herein can contain two or more polynucleotides (e.g., RNA, e.g., mRNA).

[1021] In one embodiment, the lipid nanoparticles described herein can comprise polynucleotides (e.g., mRNA) in a lipid:polynucleotide weight ratio of 5:1, 10:1, 15:1, 20:1, 25:1, 30:1, 35:1, 40:1, 45:1, 50:1, 55:1, 60:1 or 70:1, or a range or any of these ratios such as, but not limited to, 5:1 to about 10:1, from about 5:1 to about 15:1, from about 5:1 to about 20:1, from about 5:1 to about 25:1, from about 5:1 to about 30:1, from about 5:1 to about 35:1, from about 5:1 to about 40:1, from about 5:1 to about 45:1, from about 5:1 to about 50:1, from about 5:1 to about 55:1, from about 5:1 to about 60:1, from about 5:1 to about 70:1, from about 10:1 to about 15:1, from about 10:1 to about 20:1, from about 10:1 to about 25:1, from about 10:1 to about 30:1, from about 10:1 to about 35:1, from about 10:1 to about 40:1, from about 10:1 to about 45:1, from about 10:1 to about 50:1, from about 10:1 to about 55:1, from about 10:1 to about 60:1, from about 10:1 to about 70:1, from about 15:1 to about 20:1, from about 15:1 to about 25:1, from about 15:1 to about 30:1, from about 15:1 to about 35:1, from about 15:1 to about 40:1, from about 15:1 to about 45:1, from about 15:1 to about 50:1, from about 15:1 to about 55:1, from about 15:1 to about 60:1 or from about 15:1 to about 70:1.

[1022] In one embodiment, the lipid nanoparticles described herein can comprise the polynucleotide in a concentration from approximately 0.1 mg/ml to 2 mg/ml such as, but not limited to, 0.1 mg/ml, 0.2 mg/ml, 0.3 mg/ml, 0.4 mg/ml, 0.5 mg/ml, 0.6 mg/ml, 0.7 mg/ml, 0.8 mg/ml, 0.9 mg/ml, 1.0 mg/ml, 1.1 mg/ml, 1.2 mg/ml, 1.3 mg/ml, 1.4 mg/ml, 1.5 mg/ml, 1.6 mg/ml, 1.7 mg/ml, 1.8 mg/ml, 1.9 mg/ml, 2.0 mg/ml or greater than 2.0 mg/ml.

### Therapeutic Methods

### Methods of Using the LNP Compositions

[1023] In an aspect, the disclosure provides a composition comprising a lipid nanoparticle (LNP) comprising a polynucleotide comprising an mRNA which encodes an ITB6 molecule in the treatment of a disease associated with an aberrant T cell function in a subject.

[1024] In another aspect, the disclosure provides a composition comprising a lipid nanoparticle (LNP) comprising a polynucleotide comprising an mRNA which encodes an ITB6 molecule for inhibiting an immune response in a subject.

[1025] In another aspect, the disclosure provides a composition comprising a lipid nanoparticle (LNP) comprising a polynucleotide comprising an mRNA which encodes an ITB6 molecule for inducing immune tolerance, e.g., in a subject.

[1026] In another aspect, the disclosure provides a composition comprising a lipid nanoparticle (LNP) comprising a polynucleotide comprising an mRNA which encodes an ITB6 molecule for suppressing T cells.

[1027] In another aspect, the disclosure provides a composition comprising a lipid nanoparticle (LNP) comprising a polynucleotide comprising an mRNA which encodes an ITB6 molecule for reprogramming myeloid and/or dendritic cells, e.g., to have a tolerogenic phenotype.

[1028] In another aspect, the disclosure provides a composition comprising a lipid nanoparticle (LNP) comprising a polynucleotide comprising an mRNA which encodes an ITB6 molecule for use, in the treatment of a disease associated with an aberrant T cell function in a subject.

[1029] In a related aspect, provided herein is a method of treating a disease associated with aberrant T cell function in a subject, comprising administering to the subject an effective amount of a lipid nanoparticle (LNP) comprising a lipid nanoparticle (LNP) comprising a polynucleotide comprising an mRNA which encodes an ITB6 molecule.

[1030] In embodiments of any of the methods disclosed herein, administration of the LNP results in suppression of T cell activity and/or function (e.g., T cell anergy and/or T cell apoptosis) in a population of immune cells, e.g., as compared to T cell activity and/or function in an otherwise similar population of cells which has not been contacted with the LNP composition comprising a polynucleotide comprising an mRNA which encodes an ITB6 molecule.

[1031] In some embodiments, suppression of T cell activity and/or function comprises any one, two, three, four, or all of the following: (i) reduced level and/or activity of effector cytokines IFNg, e.g., secreted IFNg, in a sample; (ii) reduction in T cell proliferation, survival and/or expansion; (iii) increased T cell apoptosis; (iv) reduction in expression and/or activity of a T cell transcription factor, e.g., T-bet; and/or (v) increase in and/or activation of T reg differentiation.

[1032] In embodiments of any of the methods disclosed herein, administration of the LNP results in a reduction in the level (e.g., expression) and/or activity of a costimulatory molecule, e.g., CD80, CD86, and/or MHCII, in a sample upon stimulation.

[1033] In embodiments of any of the methods disclosed herein, administration of the LNP results in: (i) reduced engraftment of donor cells, e.g., donor immune cells, e.g., T cells, in a subject or host, e.g., a human, rat or mouse; (ii) reduction in the level, activity and/or secretion of IFNg from engrafted donor immune cells, e.g., T cells, in a subject or host, e.g., a human, rat or mouse; and/or (iii) an absence of, prevention of, or delay in the onset of, graft vs host disease (GvHD) in a subject or a host, e.g., a human, rat or mouse.

[1034] In embodiments of any of the methods disclosed herein, administration of LNP results in reduced percentages of CD25+ and/or Tbet+ cells among intrahepatic CD8 T cells in a subject. In an embodiment, the subject has GvHD.

[1035] In embodiments of any of the methods disclosed herein, administration of the LNP results in: amelioration or reduction of acute graft vs. host disease, e.g., reduction in weight loss and/or B cell depletion, e.g., as described herein, in a subject, e.g., as measured by an assay described in Example 6.

[1036] In embodiments of any of the methods disclosed herein, administration of the LNP results in an increase in the expression level of one or more (e.g., 2, 3, 4, or 5) biomarkers comprising PMEPA1, ITGAE/CD103, SMAD7, SKIL, SKI, or any combination thereof. In some embodiments, the expression level of such a biomarker may be determined to be higher in a sample obtained from a subject sensitive or responsive to a treatment (e.g., treatment with an ITB6 mRNA) than a reference level, e.g., the median expression level of the biomarker in a sample from a group/population of subjects, e.g., subjects not having received treatment with an ITB6 mRNA; the median expression level of the biomarker in a sample from a group/population of subjects, and identified as not responding to a treatment; or the level in a sample previously obtained from the individual at a prior time (e.g., prior to treatment with an ITB6 mRNA). In embodiments of any of the methods disclosed herein, the method further comprises assessing the responsiveness of the subject to the treatment or the efficacy of the treatment. In some embodiments, treatment with the LNP is continued when the subject is responsive to the treatment. In some embodiments, treatment with the LNP is discontinued when the subject is not responsive to the treatment. In some embodiments, the subject is selected for continued treatment of the LNP when the subject is responsive to the treatment. In some embodiments, the subject is not selected for continued treatment of the LNP when the subject is not responsive to the treatment. In some embodiments, continued treatment with the LNP is selected for the subject when the subject is responsive to the treatment. In some embodiments, continued treatment with the LNP is not selected for the subject when the subject is not responsive to the treatment.

### LNP Dosing and Dosing Regimen

[1037] In some embodiments, any of the LNP disclosed herein can be administered according to a dosing interval, e.g., as described herein. In some embodiments, the dosing interval comprises an initial dose of the LNP composition and one or more subsequent doses (e.g., 1-50 doses, 5-50 doses, 10-50 doses, 15-50 doses, 20-50 doses, 25-50 doses, 30-50 doses, 35-50 doses, 40-50 doses, 45-50 doses, 1-45 doses, 1-40 doses, 1-35 doses, 1-30 doses, 1-25 doses, 1-20 doses, 1-15 doses, 1-10 doses, 1-5 doses) of the same LNP composition.

[1038] In some embodiments, the dosing interval comprises one or more doses of the LNP composition and one or more doses of an additional agent.

[1039] In some embodiments, the dosing interval is performed over at least 1 week, 2 weeks, 3 weeks, or 4 weeks.

[1040] In some embodiments, the dosing interval comprises a cycle, e.g., a seven-day cycle.

[1041] In some embodiments, the dosing interval is repeated at least 1 time, at least 2 times, at least 3 times, at least 4 times, at least 5 times, at least 6 times, at least 7 times, at least 8 times, at least 9 times, or at least 10 times. In some embodiments, the repeated dosing interval is performed over at least 2 weeks, 3 weeks, 4 weeks, 2 months, 3 months, 4 months, 5 months, 6 months, 7 months, 8 months, 9 months, 10 months, 11 months, 12 months, 13 months, 14 months, 15 months, 16 months, 17 months, 18 months, 19 months, 20 months, 21 months, 22 months, 23 months, 24 months, 3 years, 4 years or 5 years.

[1042] In some embodiments, any of the LNP disclosed herein is administered daily for at least 1 week, 2 weeks, 3 weeks, 4 weeks, 5 weeks, 6 weeks, 7 weeks, 8 weeks, 3 months, 4 months, 5 months, 6 months, 7 months, 8 months, 9 months, 10 months, 11 months or 1 year. In some embodiments, the LNP composition is administered for at least 2, 3, 4, 5, or 6 consecutive days in a seven day cycle, e.g., wherein the cycle is repeated about 1-20 times.

[1043] In some embodiments of a combination therapy disclosed herein, the LNP compositions are administered according to a dosing interval, e.g., as described herein.

[1044] In some embodiments, the dosing interval comprises an initial dose of the LNP composition, or the combination comprising a first LNP composition and a second LNP composition and one or more subsequent doses (e.g., 1-50 doses, 5-50 doses, 10-50 doses, 15-50 doses, 20-50 doses, 25-50 doses, 30-50 doses, 35-50 doses, 40-50 doses, 45-50 doses, 1-45 doses, 1-40 doses, 1-35 doses, 1-30 doses, 1-25 doses, 1-20 doses, 1-15 doses, 1-10 doses, 1-5 doses) of the same LNP composition, or the same combination comprising a first LNP composition and a second LNP composition.

[1045] In some embodiments, the dosing interval comprises one or more doses of the LNP composition, or the combination comprising a first LNP composition and a second LNP composition, and one or more doses of an additional agent.

[1046] In some embodiments, the dosing interval is performed over at least 1 week, 2 weeks, 3 weeks, or 4 weeks.

[1047] In some embodiments, the dosing interval comprises a cycle, e.g., a seven-day cycle.

[1048] In some embodiments, the dosing interval is repeated at least 1 time, at least 2 times, at least 3 times, at least 4 times, at least 5 times, at least 6 times, at least 7 times, at least 8 times, at least 9 times, or at least 10 times. In some embodiments, the repeated dosing interval is performed over at least 2 weeks, 3 weeks, 4 weeks, 2 months, 3 months, 4 months, 5 months, 6 months, 7 months, 8 months, 9 months, 10 months, 11 months, 12 months, 13 months, 14 months, 15 months, 16 months, 17 months, 18 months, 19 months, 20 months, 21 months, 22 months, 23 months, 24 months, 3 years, 4 years or 5 years.

[1049] In some embodiments, any of the LNP disclosed herein is administered daily for at least 1 week, 2 weeks, 3 weeks, 4 weeks, 5 weeks, 6 weeks, 7 weeks, 8 weeks, 3 months, 4 months, 5 months, 6 months, 7 months, 8 months, 9 months, 10 months, 11 months or 1 year. In some embodiments, the LNP composition is administered for at least 2, 3, 4, 5, or 6 consecutive days in a seven day cycle, e.g., wherein the cycle is repeated about 1-20 times.

[1050] In some embodiments of any of the LNP compositions disclosed herein, the LNP composition is administered at a dose, e.g., total dose, of about 0.1-10 mg per kg, about 0.1-9.5 mg per kg, about 0.1-9 mg per kg, about 0.1-8.5 mg per kg, about 0.1-8 mg per kg, about 0.1-7.5 mg per kg, about 0.1-7 mg per kg, about 0.1-6.5 mg per kg, about 0.1-6 mg per kg, about 0.1-5.5 mg per kg, about 0.1-5 mg per kg, about 0.1-4.5 mg per kg, about 0.1-4 mg per kg, about 0.1-3.5 mg per kg, about 0.1-3 mg per kg, about 0.1-2.5 mg per kg, about 0.1-2 mg per kg, about 0.1-1.5 mg per kg, about 0.1-1 mg per kg, about 0.1-0.9 mg per kg, about 0.1-0.8 mg per kg, about 0.1-0.7 mg per kg, about 0.1-0.6 mg per kg, or about 0.1-0.5 mg per kg.

[1051] In some embodiments of any of the LNP compositions disclosed herein, the LNP composition is administered at a dose, e.g., total dose, of about 0.2-10 mg per kg, about, 0.3-10 mg per kg, about 0.4-10 mg per kg, about 0.5-10 mg per kg, about 0.6-10 mg per kg, about 0.7-10 mg per kg, about 0.8-10 mg per kg, about 0.9-10 mg per kg, about 1-10 mg per kg, about 1.5-10 mg per kg, about 2-10 mg per kg, about 2.5-10 mg per kg, about 3-10 mg per kg, about 3.5-10 mg per kg, about 4-10 mg per kg, about 4.5-10 mg per kg, about 5-10 mg per kg, about 5.5-10 mg per kg, about 6-10 mg per kg, about 6.5-10 mg per kg, about 7-10 mg per kg, about 7.5-10 mg per kg, about 8-10 mg per kg, about 8.5-10 mg per kg, about 9-10 mg per kg, or about 9.5-10 mg per kg.

[1052] In some embodiments of any of the LNP compositions disclosed herein, the LNP composition is administered at a dose, e.g., total dose, of about 0.1 mg per kg.

[1053] In some embodiments of any of the LNP compositions disclosed herein, the LNP composition is administered at a dose, e.g., total dose, of about 0.2 mg per kg.

[1054] In some embodiments of any of the LNP compositions disclosed herein, the LNP composition is administered at a dose, e.g., total dose, of about 0.3 mg per kg.

[1055] In some embodiments of any of the LNP compositions disclosed herein, the LNP composition is administered at a dose, e.g., total dose, of about 0.4 mg per kg.

[1056] In some embodiments of any of the LNP compositions disclosed herein, the LNP composition is administered at a dose, e.g., total dose, of about 0.5 mg per kg.

[1057] In some embodiments of any of the LNP compositions disclosed herein, the LNP composition is administered at a dose, e.g., dose of each LNP, of about 0.1-10 mg per kg, about 0.1-9.5 mg per kg, about 0.1-9 mg per kg, about 0.1-8.5 mg per kg, about 0.1-8 mg per kg, about 0.1-7.5 mg per kg, about 0.1-7 mg per kg, about 0.1-6.5 mg per kg, about 0.1-6 mg per kg, about 0.1-5.5 mg per kg, about 0.1-5 mg per kg, about 0.1-4.5 mg per kg, about 0.1-4 mg per kg, about 0.1-3.5 mg per kg, about 0.1-3 mg per kg, about 0.1-2.5 mg per kg, about 0.1-2 mg per kg, about 0.1-1.5 mg per kg, about 0.1-1 mg per kg, about 0.1-0.9 mg per kg, about 0.1-0.8 mg per kg, about 0.1-0.7 mg per kg, about 0.1-0.6 mg per kg, or about 0.1-0.5 mg per kg.

[1058] In some embodiments of any of the LNP compositions disclosed herein, the LNP composition is administered at a dose, e.g., dose of each LNP, of about 0.2-10 mg per kg, about, 0.3-10 mg per kg, about 0.4-10 mg per kg, about 0.5-10 mg per kg, about 0.6-10 mg per kg, about 0.7-10 mg per kg, about 0.8-10 mg per kg, about 0.9-10 mg per kg, about 1-10 mg per kg, about 1.5-10 mg per kg, about 2-10 mg per kg, about 2.5-10 mg per kg, about 3-10 mg per kg, about 3.5-10 mg per kg, about 4-10 mg per kg, about 4.5-10 mg per kg, about 5-10 mg per kg, about 5.5-10 mg per kg, about 6-10 mg per kg, about 6.5-10 mg per kg, about 7-10 mg per kg, about 7.5-10 mg per kg, about 8-10 mg per kg, about 8.5-10 mg per kg, about 9-10 mg per kg, or about 9.5-10 mg per kg.

[1059] In some embodiments of any of the LNP compositions disclosed herein, the LNP composition is administered at a dose, e.g., dose of each LNP, of about 0.1 mg per kg.

[1060] In some embodiments of any of the LNP compositions disclosed herein, the LNP composition is administered at a dose, e.g., dose of each LNP, of about 0.2 mg per kg.

[1061] In some embodiments of any of the LNP compositions disclosed herein, the LNP composition is administered at a dose, e.g., dose of each LNP, of about 0.3 mg per kg.

[1062] In some embodiments of any of the LNP compositions disclosed herein, the LNP composition is administered at a dose, e.g., dose of each LNP, of about 0.4 mg per kg.

[1063] In some embodiments of any of the LNP compositions disclosed herein, the LNP composition is administered at a dose, e.g., dose of each LNP, of about 0.5 mg per kg.

[1064] In some embodiments of any of the LNP compositions disclosed herein, the LNP composition is administered at a dose, e.g., dose of each polynucleotide in the LNP, of about 0.1-10 mg per kg, about 0.1-9.5 mg per kg, about 0.1-9 mg per kg, about 0.1-8.5 mg per kg, about 0.1-8 mg per kg, about 0.1-7.5 mg per kg, about 0.1-7 mg per kg, about 0.1-6.5 mg per kg, about 0.1-6 mg per kg, about 0.1-5.5 mg per kg, about 0.1-5 mg per kg, about 0.1-4.5 mg per kg, about 0.1-4 mg per kg, about 0.1-3.5 mg per kg, about 0.1-3 mg per kg, about 0.1-2.5 mg per kg, about 0.1-2 mg per kg, about 0.1-1.5 mg per kg, about 0.1-1 mg per kg, about 0.1-0.9 mg per kg, about 0.1-0.8 mg per kg, about 0.1-0.7 mg per kg, about 0.1-0.6 mg per kg, or about 0.1-0.5 mg per kg.

[1065] In some embodiments of any of the LNP compositions disclosed herein, the LNP composition is administered at a dose, e.g., dose of each polynucleotide in the LNP, of about 0.2-10 mg per kg, about, 0.3-10 mg per kg, about 0.4-10 mg per kg, about 0.5-10 mg per kg, about 0.6-10 mg per kg, about 0.7-10 mg per kg, about 0.8-10 mg per kg, about 0.9-10 mg per kg, about 1-10 mg per kg, about 1.5-10 mg per kg, about 2-10 mg per kg, about 2.5-10 mg per kg, about 3-10 mg per kg, about 3.5-10 mg per kg, about 4-10 mg per kg, about 4.5-10 mg per kg, about 5-10 mg per kg, about 5.5-10 mg per kg, about 6-10 mg per kg, about 6.5-10 mg per kg, about 7-10 mg per kg, about 7.5-10 mg per kg, about 8-10 mg per kg, about 8.5-10 mg per kg, about 9-10 mg per kg, or about 9.5-10 mg per kg.

[1066] In some embodiments of any of the LNP compositions disclosed herein, the LNP composition is administered at a dose, e.g., dose of each polynucleotide in the LNP, of about 0.1 mg per kg.

[1067] In some embodiments of any of the LNP compositions disclosed herein, the LNP composition is administered at a dose, e.g., dose of each polynucleotide in the LNP, of about 0.2 mg per kg.

[1068] In some embodiments of any of the LNP compositions disclosed herein, the LNP composition is administered at a dose, e.g., dose of each polynucleotide in the LNP, of about 0.3 mg per kg.

[1069] In some embodiments of any of the LNP compositions disclosed herein, the LNP composition is administered at a dose, e.g., dose of each polynucleotide in the LNP, of about 0.4 mg per kg.

[1070] In some embodiments of any of the LNP compositions disclosed herein, the LNP composition is administered at a dose, e.g., dose of each polynucleotide in the LNP, of about 0.5 mg per kg.

[1071] In some embodiments, any of the LNP disclosed herein is administered by a route of administration chosen from: subcutaneous, intramuscular, intravenous, intranasal, oral, intraocular, or rectal. In some embodiments, the route of administration is subcutaneous.

[1072] In some embodiments, the route of administration is intramuscular. In some embodiments, the route of administration is intravenous. In some embodiments, the route of administration is In some embodiments, the route of administration is intranasal. In some embodiments, the route of administration is oral. In some embodiments, the route of administration is intraocular. In some embodiments, the route of administration is rectal.

### Diseases and Disorders

[1073] In an embodiment of any of the methods of treatment or compositions for use disclosed herein, the subject has, or is identified as having, a disease or disorder associated with aberrant T cell function. In an embodiment, the disease is an autoimmune disease, or a disease with hyper-activated immune function. In an embodiment, an LNP disclosed herein is administered to the subject to treat or ameliorate a symptom of the disease or disorder. In an embodiment, an LNP disclosed herein is administered to a subject to inhibit an immune response in the subject.

[1074] In an embodiment, the autoimmune disease is chosen from: rheumatoid arthritis (RA); graft versus host disease (GVHD) (e.g., acute GVHD or chronic GVHD); diabetes, e.g., Type 1 diabetes; inflammatory bowel disease (IBD); lupus (e.g., systemic lupus erythematosus (SLE)); autoimmune hepatitis (e.g., Type 1 or Type 2); primary biliary cholangitis; organ transplant associated rejection; myasthenia gravis; psoriasis; or polymyositis (also known as dermatomyositis).

[1075] In an embodiment, the autoimmune disease is rheumatoid arthritis (RA). In an embodiment, the autoimmune disease is graft versus host disease (GVHD) (e.g., acute GVHD or chronic GVHD). In an embodiment, the autoimmune disease is diabetes, e.g., Type 1 diabetes. In an embodiment, the autoimmune disease is inflammatory bowel disease (IBD). In an embodiment, IBD comprises colitis, ulcerative colitis or Crohn's disease. In an embodiment, the autoimmune disease is lupus, e.g., systemic lupus erythematosus (SLE). In an embodiment, the autoimmune disease is autoimmune hepatitis, e.g., Type 1 or Type 2. In an embodiment, the autoimmune disease is primary biliary cholangitis.

[1076] In an embodiment, the autoimmune disease is organ transplant associated rejection. In an embodiment, an organ transplant associated rejection comprises allograft rejection; e.g., renal rejection, liver transplant rejection; bone marrow transplant rejection; or stem cell transplant rejection. In an embodiment, a stem cell transplant comprises a transplant of any one or all of the following types of cells: stem cells, cord blood stem cells, hematopoietic stem cells, embryonic stem cells, cells derived from or comprising mesenchymal stem cells, and/or induced stem cells (e.g., induced pluripotent stem cells). In an embodiment, the stem cell comprises a pluripotent stem cell.

[1077] In an embodiment, the autoimmune disease is myasthenia gravis. In an embodiment, the autoimmune disease is psoriasis. In an embodiment, the autoimmune disease is polymyositis.

[1078] In an embodiment the subject is a mammal, e.g., a human.

### Combination Therapies

[1079] In some embodiments, the methods of treatment or compositions for use disclosed herein, comprise administering an LNP disclosed herein in combination with an additional agent. In an embodiment, the additional agent is a standard of care for the disease or disorder, e.g., autoimmune disease. In an embodiment, the additional agent is an mRNA In some aspects, the subject for the present methods or compositions has been treated with one or more standard of care therapies. In other aspects, the subject for the present methods or compositions has not been responsive to one or more standard of care therapies.

### Biomarkers for Evaluating Therapeutic Efficacy

[1080] Provided herein are methods of assessing the responsiveness of a subject to a treatment or the efficacy of a treatment (e.g., treatment with an ITB6 mRNA). In some embodiments, the method includes acquiring (e.g., determining or measuring) the level of one or more genes in a sample from the subject that correlates with therapeutic efficacy of and comparing the level to a reference level, thereby evaluating the effectiveness of the therapy.

[1081] In some embodiments, the expression level of such a biomarker may be determined to be higher in a sample obtained from a patient sensitive or responsive to a treatment (e.g., treatment with an ITB6 mRNA) than a reference level, e.g., the median expression level of the biomarker in a sample from a group/population of patients, e.g., patients not having received treatment with an ITB6 mRNA; the median expression level of the biomarker in a sample from a group/population of patients, and identified as not responding to a treatment; or the level in a sample previously obtained from the individual at a prior time (e.g., prior to treatment with an ITB6 mRNA).

[1082] In some embodiments, the biomarker is one or more (e.g., 2, 3, 4, or 5) biomarkers comprising PMEPA1, ITGAE/CD103, SMAD7, SKIL, SKI, or any combination thereof. In some embodiments, an increase in the level of expression of one or more (e.g., 2, 3, 4, or 5) of PMEPA1, ITGAE/CD103, SMAD7, SKIL, and SKI in a sample from a subject following therapy (e.g., with an ITB6 mRNA) relative to a reference level is indicative of a response to the therapy.

[1083] In some embodiments, where the expression level of the one or more biomarkers compared to a reference expression level indicates a responsiveness to the therapy (e.g., a therapy comprising an ITB6 mRNA), the method further includes administering one or more additional doses of the therapy to the subject.

[1084] In some embodiments, an increase in expression level (e.g., an increase in the expression level of about 10%, 20%, 30%, 40%, 50%, 60%, 70%, 80%, 90%, 95%, 96%, 97%, 98%, or 99% or greater) of one or more (e.g., 2, 3, 4, or 5) of PMEPA1, ITGAE/CD103, SMAD7, SKIL, or SKI relative to a reference expression level identifies the subject as one who is responsive to therapy (e.g., a therapy comprising an ITB6 mRNA). In some embodiments, the increased expression level of one or more of PMEPA1, ITGAE/CD103, SMAD7, SKIL, or SKI is an increase of at least about 1.1×, 1.2×, 1 3×, 1.4×, 1 5×, 1.6×, 1.7×, 1 8×, 1.9×, 2×, 2.1×, 2.2×, 2.3×, 2.4×, 2.5×, 2.6×, 2.7×, 2.8×, 2.9×, 3×, 3.5×, 4×, 4.5×, 5×, 6×, 7×, 8×, 9×, 10×, 15×, 20×, 30×, 40×, 50×, 100×, 500×, or 1000× relative to a reference expression level of the one or more genes. In some embodiments, the increased expression level of one or more (e.g., 2, 3, 4, or 5) of PMEPA1, ITGAE/CD103, SMAD7, SKIL, or SKI is an increase of at least about 1.1-fold, about 1.2-fold, about 1.3-fold, about 1.4-fold, about 1.5-fold, about 1.6-fold, about 1.7-fold, about 1.8-fold, about 1.9-fold, about 2-fold, about 2.1-fold, about 2.2-fold, about 2.3-fold, about 2.4-fold, about 2.5-fold, about 2.6-fold, about 2.7-fold, about 2.8-fold, about 2.9-fold, about 3-fold, about 3.5-fold, about 4-fold, about 4.5-fold, about 5-fold, about 6-fold, about 7-fold, about 8-fold, about 9-fold, about 10-fold, about 15-fold, about 20-fold, about 30-fold, about 40-fold, about 50-fold, about 100-fold, about 500-fold, or about 1,000-fold or greater relative to a reference expression level of the one or more genes.

[1085] In some instances of any of the preceding methods and assays the reference sample is obtained from the individual prior to (e.g., minutes, hours, days, weeks (e.g., 1, 2, 3, 4, 5, 6, or 7 weeks), months, or years prior to) administration of therapy. In some instances of any of the preceding methods, the sample from the individual is obtained days, weeks, months, or years following administration of the therapy. In some embodiments, the sample is obtained about 1 to about 7 days (e.g., 1, 2, 3, 4, 5, 6, or 7 days) following administration of a therapy. In some embodiments, the sample is obtained about 1 to about 10 weeks (e.g., 1, 2, 3, 4, 5, 6, 7, 8, 9, or 10 weeks) following administration of a therapy.

[1086] In some embodiments of any of the preceding methods and assays, the sample and/or the reference sample comprises a serum sample, a blood sample, a plasma sample, or a sample containing peripheral blood mononuclear cells (PBMCs).

[1087] In some embodiments, the expression level of one or more biomarkers (e.g., one or more (e.g., 2, 3, 4, or 5) of PMEPA1, ITGAE/CD103, SMAD7, SKIL, or SKI) in a sample (e.g., a blood sample, a serum sample, a plasma sample, or a sample containing PBMCs) can be determined qualitatively and/or quantitatively based on any suitable criterion known in the art, including, but not limited to, the measurement of DNA, mRNA, cDNA, proteins, protein fragments, and/or gene copy number levels in an individual.

[1088] Methodologies for measuring such biomarkers are known in the art and understood by the skilled artisan, including, but not limited to, whole genome sequencing, polymerase chain reaction (PCR) including quantitative real time PCR (qRT-PCR) and other amplification type detection methods, such as, for example, branched DNA, SISBA, TMA and the like, RNASeq, microarray analysis, gene expression profiling, whole-genome sequencing (WGS), and/or serial analysis of gene expression (“SAGE”), direct digital counting of nucleic acids (e.g., Nanostring nCounter), immunohistochemistry (“IHC”), Western blot analysis, immunoprecipitation, molecular binding assays, ELISA, ELIFA, fluorescence activated cell sorting (“FACS”), MassARRAY, proteomics, biochemical enzymatic activity assays, in situ hybridization (ISH), fluorescence in situ hybridization (FISH), Southern analysis, Northern analysis, as well as any one of the wide variety of assays that can be performed by protein, gene, and/or tissue array analysis.

[1089] In some instances of any of the preceding methods and assays, the expression level of a biomarker may be a nucleic acid expression level (e.g., a DNA expression level or an RNA expression level (e.g., an mRNA expression level)). Any suitable method of determining a nucleic acid expression level may be used. In some instances, the nucleic acid expression level is determined using RNAseq or qPCR.

[1090] In other instances of any of the preceding methods, the expression level of a biomarker may be a protein expression level. In certain instances, the method comprises contacting the sample with antibodies that specifically bind to a biomarker described herein under conditions permissive for binding of the biomarker, and detecting whether a complex is formed between the antibodies and biomarker.

[1091] Any method of measuring protein expression levels known in the art or provided herein may be used. For example, in some instances, a protein expression level of a biomarker is determined using a method selected from, but not limited to western blot, enzyme-linked immunosorbent assay (ELISA), immunoprecipitation, immunohistochemistry (IHC), flow cytometry (e.g., fluorescence-activated cell sorting (FACS™)), immunofluorescence, radioimmunoassay, dot blotting, immunodetection methods, HPLC, surface plasmon resonance, optical spectroscopy, mass spectrometry, liquid chromatography-mass spectrometry (LC-MS), nephelometry, aptamer technology, and HPLC.

### Sequence Optimization and Methods Thereof

[1092] In some embodiments, a polynucleotide of the disclosure comprises a sequence-optimized nucleotide sequence encoding a polypeptide disclosed herein, e.g., an ITB6 molecule. In some embodiments, the polynucleotide of the disclosure comprises an open reading frame (ORF) encoding an ITB6 polypeptide, wherein the ORF has been sequence optimized.

[1093] The sequence-optimized nucleotide sequences disclosed herein are distinct from the corresponding wild type nucleotide acid sequences and from other known sequence-optimized nucleotide sequences, e.g., these sequence-optimized nucleic acids have unique compositional characteristics.

[1094] In some embodiments, the percentage of uracil or thymine nucleobases in a sequence-optimized nucleotide sequence (e.g., encoding an ITB6 molecule, a functional fragment, or a variant thereof) is modified (e.g., reduced) with respect to the percentage of uracil or thymine nucleobases in the reference wild-type nucleotide sequence. Such a sequence is referred to as a uracil-modified or thymine-modified sequence. The percentage of uracil or thymine content in a nucleotide sequence can be determined by dividing the number of uracils or thymines in a sequence by the total number of nucleotides and multiplying by 100. In some embodiments, the sequence-optimized nucleotide sequence has a lower uracil or thymine content than the uracil or thymine content in the reference wild-type sequence. In some embodiments, the uracil or thymine content in a sequence-optimized nucleotide sequence of the disclosure is greater than the uracil or thymine content in the reference wild-type sequence and still maintain beneficial effects, e.g., increased expression and/or signaling response when compared to the reference wild-type sequence.

[1095] In some embodiments, the optimized sequences of the present disclosure contain unique ranges of uracils or thymine (if DNA) in the sequence. The uracil or thymine content of the optimized sequences can be expressed in various ways, e.g., uracil or thymine content of optimized sequences relative to the theoretical minimum (% UTM or % TTM), relative to the wild-type (% UWT or % TWT), and relative to the total nucleotide content (% UTL or % TTL). For DNA it is recognized that thymine is present instead of uracil, and one would substitute T where U appears. Thus, all the disclosures related to, e.g., % UTM, % UWT, or % UTL, with respect to RNA are equally applicable to % TTM, % TWT, or % TTL with respect to DNA.

[1096] Uracil- or thymine-content relative to the uracil or thymine theoretical minimum, refers to a parameter determined by dividing the number of uracils or thymines in a sequence-optimized nucleotide sequence by the total number of uracils or thymines in a hypothetical nucleotide sequence in which all the codons in the hypothetical sequence are replaced with synonymous codons having the lowest possible uracil or thymine content and multiplying by 100. This parameter is abbreviated herein as % UTM or % TTM.

[1097] In some embodiments, a uracil-modified sequence encoding an ITB6 molecule polypeptide of the disclosure has a reduced number of consecutive uracils with respect to the corresponding wild-type nucleic acid sequence. For example, two consecutive leucines can be encoded by the sequence CUUUUG, which includes a four-uracil cluster. Such a subsequence can be substituted, e.g., with CUGCUC, which removes the uracil cluster. Phenylalanine can be encoded by UUC or UUU. Thus, even if phenylalanines encoded by UUU are replaced by UUC, the synonymous codon still contains a uracil pair (UU). Accordingly, the number of phenylalanines in a sequence establishes a minimum number of uracil pairs (UU) that cannot be eliminated without altering the number of phenylalanines in the encoded polypeptide.

[1098] In some embodiments, a uracil-modified sequence encoding an ITB6 molecule polypeptide of the disclosure has a reduced number of uracil triplets (UUU) with respect to the wild-type nucleic acid sequence. In some embodiments, a uracil-modified sequence encoding an ITB6 molecule polypeptide has a reduced number of uracil pairs (UU) with respect to the number of uracil pairs (UU) in the wild-type nucleic acid sequence. In some embodiments, a uracil-modified sequence encoding an ITB6 molecule polypeptide of the disclosure has a number of uracil pairs (UU) corresponding to the minimum possible number of uracil pairs (UU) in the wild-type nucleic acid sequence.

[1099] The phrase “uracil pairs (UU) relative to the uracil pairs (UU) in the wild type nucleic acid sequence,” refers to a parameter determined by dividing the number of uracil pairs (UU) in a sequence-optimized nucleotide sequence by the total number of uracil pairs (UU) in the corresponding wild-type nucleotide sequence and multiplying by 100. This parameter is abbreviated herein as % UUwt. In some embodiments, a uracil-modified sequence encoding an ITB6 molecule polypeptide has a % UUwt between below 100%.

[1100] In some embodiments, the polynucleotide of the disclosure comprises a uracil-modified sequence encoding an ITB6 molecule polypeptide disclosed herein. In some embodiments, the uracil-modified sequence encoding an ITB6 molecule polypeptide comprises at least one chemically modified nucleobase, e.g., 5-methoxyuracil. In some embodiments, at least 95% of a nucleobase (e.g., uracil) in a uracil-modified sequence encoding an ITB6 molecule polypeptide of the disclosure are modified nucleobases. In some embodiments, at least 95% of uracil in a uracil-modified sequence encoding an ITB6 molecule polypeptide is 5-methoxyuracil. In some embodiments, the polynucleotide comprising a uracil-modified sequence further comprises a miRNA binding site, e.g., a miRNA binding site that binds to miR-122. In some embodiments, the polynucleotide comprising a uracil-modified sequence is formulated with a delivery agent, e.g., a compound having Formula (I), e.g., any of Compounds Nos. 18, 25, 301, or 357.

[1101] In some embodiments, a polynucleotide of the disclosure (e.g., a polynucleotide) comprising a nucleotide sequence encoding ITB6 molecule polypeptide (e.g., the wild-type sequence, functional fragment, or variant thereof) is sequence optimized.

[1102] A sequence optimized nucleotide sequence (nucleotide sequence is also referred to as “nucleic acid” herein) comprises at least one codon modification with respect to a reference sequence (e.g., a wild-type sequence encoding an ITB6 molecule polypeptide). Thus, in a sequence optimized nucleic acid, at least one codon is different from a corresponding codon in a reference sequence (e.g., a wild-type sequence).

[1103] In general, sequence optimized nucleic acids are generated by at least a step comprising substituting codons in a reference sequence with synonymous codons (i.e., codons that encode the same amino acid). Such substitutions can be effected, for example, by applying a codon substitution map (i.e., a table providing the codons that will encode each amino acid in the codon optimized sequence), or by applying a set of rules (e.g., if glycine is next to neutral amino acid, glycine would be encoded by a certain codon, but if it is next to a polar amino acid, it would be encoded by another codon). In addition to codon substitutions (i.e., “codon optimization”) the sequence optimization methods disclosed herein comprise additional optimization steps which are not strictly directed to codon optimization such as the removal of deleterious motifs (destabilizing motif substitution). Compositions and formulations comprising these sequence-optimized nucleic acids (e.g., a RNA, e.g., an mRNA) can be administered to a subject in need thereof to facilitate in vivo expression of functionally active ITB6 molecule polypeptide.

[1104] Additional and exemplary methods of sequence optimization are disclosed in International PCT application WO 2017/201325, filed on 18 May 2017, the entire contents of which are hereby incorporated by reference.

MicroRNA (miRNA) Binding Sites

[1105] Polynucleotides of the invention can include regulatory elements, for example, microRNA (miRNA) binding sites, transcription factor binding sites, structured mRNA sequences and/or motifs, artificial binding sites engineered to act as pseudo-receptors for endogenous nucleic acid binding molecules, and combinations thereof. In some embodiments, polynucleotides including such regulatory elements are referred to as including “sensor sequences”.

[1106] In some embodiments, a polynucleotide (e.g., a ribonucleic acid (RNA), e.g., a messenger RNA (mRNA)) of the invention comprises an open reading frame (ORF) encoding a polypeptide of interest and further comprises one or more miRNA binding site(s). Inclusion or incorporation of miRNA binding site(s) provides for regulation of polynucleotides of the invention, and in turn, of the polypeptides encoded therefrom, based on tissue-specific and/or cell-type specific expression of naturally-occurring miRNAs.

[1107] The present invention also provides pharmaceutical compositions and formulations that comprise any of the polynucleotides described above. In some embodiments, the composition or formulation further comprises a delivery agent.

[1108] In some embodiments, the composition or formulation can contain a polynucleotide comprising a sequence optimized nucleic acid sequence disclosed herein which encodes a polypeptide. In some embodiments, the composition or formulation can contain a polynucleotide (e.g., a RNA, e.g., an mRNA) comprising a polynucleotide (e.g., an ORF) having significant sequence identity to a sequence optimized nucleic acid sequence disclosed herein which encodes a polypeptide. In some embodiments, the polynucleotide further comprises a miRNA binding site, e.g., a miRNA binding site that binds

[1109] A miRNA, e.g., a natural-occurring miRNA, is a 19-25 nucleotide long noncoding RNA that binds to a polynucleotide and down-regulates gene expression either by reducing stability or by inhibiting translation of the polynucleotide. A miRNA sequence comprises a “seed” region, i.e., a sequence in the region of positions 2-8 of the mature miRNA. A miRNA seed can comprise positions 2-8 or 2-7 of the mature miRNA.

[1110] microRNAs derive enzymatically from regions of RNA transcripts that fold back on themselves to form short hairpin structures often termed a pre-miRNA (precursor-miRNA). A pre-miRNA typically has a two-nucleotide overhang at its 3′ end, and has 3′ hydroxyl and 5′ phosphate groups. This precursor-mRNA is processed in the nucleus and subsequently transported to the cytoplasm where it is further processed by DICER (a RNase III enzyme), to form a mature microRNA of approximately 22 nucleotides. The mature microRNA is then incorporated into a ribonuclear particle to form the RNA-induced silencing complex, RISC, which mediates gene silencing. Art-recognized nomenclature for mature miRNAs typically designates the arm of the pre-miRNA from which the mature miRNA derives; “5p” means the microRNA is from the 5-prime arm of the pre-miRNA hairpin and “3p” means the microRNA is from the 3-prime end of the pre-miRNA hairpin. A miR referred to by number herein can refer to either of the two mature microRNAs originating from opposite arms of the same pre-miRNA (e.g., either the 3p or 5p microRNA). All miRs referred to herein are intended to include both the 3p and 5p arms/sequences, unless particularly specified by the 3p or 5p designation. As used herein, the term “microRNA (miRNA or miR) binding site” refers to a sequence within a polynucleotide, e.g., within a DNA or within an RNA transcript, including in the 5′UTR and/or 3′UTR, that has sufficient complementarity to all or a region of a miRNA to interact with, associate with or bind to the miRNA. In some embodiments, a polynucleotide of the invention comprising an ORF encoding a polypeptide of interest and further comprises one or more miRNA binding site(s). In exemplary embodiments, a 5′ UTR and/or 3′ UTR of the polynucleotide (e.g., a ribonucleic acid (RNA), e.g., a messenger RNA (mRNA)) comprises the one or more miRNA binding site(s).

[1111] A miRNA binding site having sufficient complementarity to a miRNA refers to a degree of complementarity sufficient to facilitate miRNA-mediated regulation of a polynucleotide, e.g., miRNA-mediated translational repression or degradation of the polynucleotide. In exemplary aspects of the invention, a miRNA binding site having sufficient complementarity to the miRNA refers to a degree of complementarity sufficient to facilitate miRNA-mediated degradation of the polynucleotide, e.g., miRNA-guided RNA-induced silencing complex (RISC)-mediated cleavage of mRNA. The miRNA binding site can have complementarity to, for example, a 19-25 nucleotide long miRNA sequence, to a 19-23 nucleotide long miRNA sequence, or to a 22-nucleotide long miRNA sequence. A miRNA binding site can be complementary to only a portion of a miRNA, e.g., to a portion less than 1, 2, 3, or 4 nucleotides of the full length of a naturally-occurring miRNA sequence, or to a portion less than 1, 2, 3, or 4 nucleotides shorter than a naturally-occurring miRNA sequence. Full or complete complementarity (e.g., full complementarity or complete complementarity over all or a significant portion of the length of a naturally-occurring miRNA) is preferred when the desired regulation is mRNA degradation. In some embodiments, a miRNA binding site includes a sequence that has complementarity (e.g., partial or complete complementarity) with a miRNA seed sequence. In some embodiments, the miRNA binding site includes a sequence that has complete complementarity with a miRNA seed sequence. In some embodiments, a miRNA binding site includes a sequence that has complementarity (e.g., partial or complete complementarity) with a miRNA sequence. In some embodiments, the miRNA binding site includes a sequence that has complete complementarity with a miRNA sequence. In some embodiments, a miRNA binding site has complete complementarity with a miRNA sequence but for 1, 2, or 3 nucleotide substitutions, terminal additions, and/or truncations.

[1112] In some embodiments, the miRNA binding site is the same length as the corresponding miRNA. In other embodiments, the miRNA binding site is one, two, three, four, five, six, seven, eight, nine, ten, eleven or twelve nucleotide(s) shorter than the corresponding miRNA at the 5′ terminus, the 3′ terminus, or both. In still other embodiments, the microRNA binding site is two nucleotides shorter than the corresponding microRNA at the 5′ terminus, the 3′ terminus, or both. The miRNA binding sites that are shorter than the corresponding miRNAs are still capable of degrading the mRNA incorporating one or more of the miRNA binding sites or preventing the mRNA from translation.

[1113] In some embodiments, the miRNA binding site binds the corresponding mature miRNA that is part of an active RISC containing Dicer. In another embodiment, binding of the miRNA binding site to the corresponding miRNA in RISC degrades the mRNA containing the miRNA binding site or prevents the mRNA from being translated. In some embodiments, the miRNA binding site has sufficient complementarity to miRNA so that a RISC complex comprising the miRNA cleaves the polynucleotide comprising the miRNA binding site. In other embodiments, the miRNA binding site has imperfect complementarity so that a RISC complex comprising the miRNA induces instability in the polynucleotide comprising the miRNA binding site. In another embodiment, the miRNA binding site has imperfect complementarity so that a RISC complex comprising the miRNA represses transcription of the polynucleotide comprising the miRNA binding site.

[1114] In some embodiments, the miRNA binding site has one, two, three, four, five, six, seven, eight, nine, ten, eleven or twelve mismatch(es) from the corresponding miRNA.

[1115] In some embodiments, the miRNA binding site has at least about ten, at least about eleven, at least about twelve, at least about thirteen, at least about fourteen, at least about fifteen, at least about sixteen, at least about seventeen, at least about eighteen, at least about nineteen, at least about twenty, or at least about twenty-one contiguous nucleotides complementary to at least about ten, at least about eleven, at least about twelve, at least about thirteen, at least about fourteen, at least about fifteen, at least about sixteen, at least about seventeen, at least about eighteen, at least about nineteen, at least about twenty, or at least about twenty-one, respectively, contiguous nucleotides of the corresponding miRNA.

[1116] By engineering one or more miRNA binding sites into a polynucleotide of the invention, the polynucleotide can be targeted for degradation or reduced translation, provided the miRNA in question is available. This can reduce off-target effects upon delivery of the polynucleotide. For example, if a polynucleotide of the invention is not intended to be delivered to a tissue or cell but ends up is said tissue or cell, then a miRNA abundant in the tissue or cell can inhibit the expression of the gene of interest if one or multiple binding sites of the miRNA are engineered into the 5′ UTR and/or 3′ UTR of the polynucleotide. Thus, in some embodiments, incorporation of one or more miRNA binding sites into an mRNA of the disclosure may reduce the hazard of off-target effects upon nucleic acid molecule delivery and/or enable tissue-specific regulation of expression of a polypeptide encoded by the mRNA. In yet other embodiments, incorporation of one or more miRNA binding sites into an mRNA of the disclosure can modulate immune responses upon nucleic acid delivery in vivo. In further embodiments, incorporation of one or more miRNA binding sites into an mRNA of the disclosure can modulate accelerated blood clearance (ABC) of lipid-comprising compounds and compositions described herein.

[1117] Conversely, miRNA binding sites can be removed from polynucleotide sequences in which they naturally occur to increase protein expression in specific tissues. For example, a binding site for a specific miRNA can be removed from a polynucleotide to improve protein expression in tissues or cells containing the miRNA.

[1118] Regulation of expression in multiple tissues can be accomplished through introduction or removal of one or more miRNA binding sites, e.g., one or more distinct miRNA binding sites. The decision whether to remove or insert a miRNA binding site can be made based on miRNA expression patterns and/or their profiling in tissues and/or cells in development and/or disease. Identification of miRNAs, miRNA binding sites, and their expression patterns and role in biology have been reported (e.g., Bonauer et al., Curr Drug Targets 2010 11:943-949; Anand and Cheresh Curr Opin Hematol 2011 18:171-176; Contreras and Rao Leukemia 2012 26:404-413 (2011 Dec. 20. doi: 10.1038/leu.2011.356); Bartel Cell 2009 136:215-233; Landgraf et al, Cell, 2007 129:1401-1414; Gentner and Naldini, Tissue Antigens. 2012 80:393-403 and all references therein; each of which is incorporated herein by reference in its entirety).

[1119] Examples of tissues where miRNA are known to regulate mRNA, and thereby protein expression, include, but are not limited to, liver (miR-122), muscle (miR-133, miR-206, miR-208), endothelial cells (miR-17-92, miR-126), myeloid cells (miR-142-3p, miR-142-5p, miR-16, miR-21, miR-223, miR-24, miR-27), adipose tissue (let-7, miR-30c), heart (miR-1d, miR-149), kidney (miR-192, miR-194, miR-204), and lung epithelial cells (let-7, miR-133, miR-126). Specifically, miRNAs are known to be differentially expressed in immune cells (also called hematopoietic cells), such as antigen presenting cells (APCs) (e.g., dendritic cells and macrophages), macrophages, monocytes, B lymphocytes, T lymphocytes, granulocytes, natural killer cells, etc. Immune cell specific miRNAs are involved in immunogenicity, autoimmunity, the immune-response to infection, inflammation, as well as unwanted immune response after gene therapy and tissue/organ transplantation. Immune cells specific miRNAs also regulate many aspects of development, proliferation, differentiation and apoptosis of hematopoietic cells (immune cells). For example, miR-142 and miR-146 are exclusively expressed in immune cells, particularly abundant in myeloid dendritic cells. It has been demonstrated that the immune response to a polynucleotide can be shut-off by adding miR-142 binding sites to the 3′-UTR of the polynucleotide, enabling more stable gene transfer in tissues and cells. miR-142 efficiently degrades exogenous polynucleotides in antigen presenting cells and suppresses cytotoxic elimination of transduced cells (e.g., Annoni A et al., blood, 2009, 114, 5152-5161; Brown B D, et al., Nat med. 2006, 12(5), 585-591; Brown B D, et al., blood, 2007, 110(13): 4144-4152, each of which is incorporated herein by reference in its entirety).

[1120] In some embodiments, a polynucleotide of the invention comprises a miRNA binding site, wherein the miRNA binding site comprises one or more nucleotide sequences selected from Table 3C or Table 4A, including one or more copies of any one or more of the miRNA binding site sequences. In some embodiments, a polynucleotide of the invention further comprises at least one, two, three, four, five, six, seven, eight, nine, ten, or more of the same or different miRNA binding sites selected from Table 3C or Table 4A, including any combination thereof.

[1121] In some embodiments, the miRNA binding site binds to miR-142 or is complementary to miR-142. In some embodiments, the miR-142 comprises SEQ ID NO:114. In some embodiments, the miRNA binding site binds to miR-142-3p or miR-142-5p. In some embodiments, the miR-142-3p binding site comprises SEQ ID NO:202. In some embodiments, the miR-142-5p binding site comprises SEQ ID NO:204. In some embodiments, the miRNA binding site comprises a nucleotide sequence at least 80%, at least 85%, at least 90%, at least 95%, or 100% identical to SEQ ID NO:202 or SEQ ID NO:204.

[1122] In some embodiments, the miRNA binding site binds to miR-126 or is complementary to miR-126. In some embodiments, the miR-126 comprises SEQ ID NO: 205. In some embodiments, the miRNA binding site binds to miR-126-3p or miR-126-5p. In some embodiments, the miR-126-3p binding site comprises SEQ ID NO: 207. In some embodiments, the miR-126-5p binding site comprises SEQ ID NO: 209. In some embodiments, the miRNA binding site comprises a nucleotide sequence at least 80%, at least 85%, at least 90%, at least 95%, or 100% identical to SEQ ID NO: 121 or SEQ ID NO: 123.

[1123] In one embodiment, the 3′ UTR comprises two miRNA binding sites, wherein a first miRNA binding site binds to miR-142 and a second miRNA binding site binds to miR-126. In a specific embodiment, the 3′ UTR binding to miR-142 and miR-126 comprises, consists, or consists essentially of the sequence of SEQ ID NO: 249.

TABLE 3C
miR-142, miR-126, and miR-142 and miR-126 binding sites

| SEQ ID NO. | Description | Sequence |
|---|---|---|
| 114 | miR-142 | GACAGUGCAGUCACCCAUAAAGUAGAAAGCA |
| | | CUACUAACAGCACUGGAGGGUGUAGUGUUUC |
| | | CUACUUUAUGGAUGAGUGUACUGUG |
| 201 | miR-142-3p | uguaguguuuccuacuuuaugga |
| 202 | miR-142-3p binding site | uccauaaaguaggaaacacuaca |
| 203 | miR-142-5p | cauaaaguagaaagcacuacu |
| 204 | miR-142-5p binding site | aguagugcuuucuacuuuaug |
| 205 | miR-126 | CGCUGGCGACGGGACAUUAUUACUUUUGGUA |
| | | CGCGCUGUGACACUUCAAACUCGUACCGUGA |
| | | GUAAUAAUGCGCCGUCCACGGCA |
| 206 | miR-126-3p | UCGUACCGUGAGUAAUAAUGCG |
| 207 | miR-126-3p binding site | CGCAUUAUUACUCACGGUACGA |
| 208 | miR-126-5p | CAUUAUUACUUUUGGUACGCG |
| 209 | miR-126-5p binding site | CGCGUACCAAAAGUAAUAAUG |

[1124] In some embodiments, a miRNA binding site is inserted in the polynucleotide of the invention in any position of the polynucleotide (e.g., the 5′ UTR and/or 3′ UTR). In some embodiments, the 5′ UTR comprises a miRNA binding site. In some embodiments, the 3′ UTR comprises a miRNA binding site. In some embodiments, the 5′ UTR and the 3′ UTR comprise a miRNA binding site. The insertion site in the polynucleotide can be anywhere in the polynucleotide as long as the insertion of the miRNA binding site in the polynucleotide does not interfere with the translation of a functional polypeptide in the absence of the corresponding miRNA; and in the presence of the miRNA, the insertion of the miRNA binding site in the polynucleotide and the binding of the miRNA binding site to the corresponding miRNA are capable of degrading the polynucleotide or preventing the translation of the polynucleotide. In some embodiments, a miRNA binding site is inserted in at least about 30 nucleotides downstream from the stop codon of an ORF in a polynucleotide of the invention comprising the ORF. In some embodiments, a miRNA binding site is inserted in at least about 10 nucleotides, at least about 15 nucleotides, at least about 20 nucleotides, at least about 25 nucleotides, at least about 30 nucleotides, at least about 35 nucleotides, at least about 40 nucleotides, at least about 45 nucleotides, at least about 50 nucleotides, at least about 55 nucleotides, at least about 60 nucleotides, at least about 65 nucleotides, at least about 70 nucleotides, at least about 75 nucleotides, at least about 80 nucleotides, at least about 85 nucleotides, at least about 90 nucleotides, at least about 95 nucleotides, or at least about 100 nucleotides downstream from the stop codon of an ORF in a polynucleotide of the invention. In some embodiments, a miRNA binding site is inserted in about 10 nucleotides to about 100 nucleotides, about 20 nucleotides to about 90 nucleotides, about 30 nucleotides to about 80 nucleotides, about 40 nucleotides to about 70 nucleotides, about 50 nucleotides to about 60 nucleotides, about 45 nucleotides to about 65 nucleotides downstream from the stop codon of an ORF in a polynucleotide of the invention. In some embodiments, a miRNA binding site is inserted within the 3′ UTR immediately following the stop codon of the coding region within the polynucleotide of the invention, e.g., mRNA. In some embodiments, if there are multiple copies of a stop codon in the construct, a miRNA binding site is inserted immediately following the final stop codon. In some embodiments, a miRNA binding site is inserted further downstream of the stop codon, in which case there are 3′ UTR bases between the stop codon and the miR binding site(s). In some embodiments, three non-limiting examples of possible insertion sites for a miR in a 3′ UTR are shown in SEQ ID NOs: 248, 249, and 250, which show a 3′ UTR sequence with a miR-142-3p site inserted in one of three different possible insertion sites, respectively, within the 3′ UTR.

[1125] In some embodiments, one or more miRNA binding sites can be positioned within the 5′ UTR at one or more possible insertion sites. For example, three non-limiting examples of possible insertion sites for a miR in a 5′ UTR are shown in SEQ ID NOs: 251, 252, or 253, which show a 5′ UTR sequence with a miR-142-3p site inserted into one of three different possible insertion sites, respectively, within the 5′ UTR.

[1126] In one embodiment, a codon optimized open reading frame encoding a polypeptide of interest comprises a stop codon and the at least one microRNA binding site is located within the 3′ UTR 1-100 nucleotides after the stop codon. In one embodiment, the codon optimized open reading frame encoding the polypeptide of interest comprises a stop codon and the at least one microRNA binding site for a miR expressed in immune cells is located within the 3′ UTR 30-50 nucleotides after the stop codon. In another embodiment, the codon optimized open reading frame encoding the polypeptide of interest comprises a stop codon and the at least one microRNA binding site for a miR expressed in immune cells is located within the 3′ UTR at least 50 nucleotides after the stop codon. In other embodiments, the codon optimized open reading frame encoding the polypeptide of interest comprises a stop codon and the at least one microRNA binding site for a miR expressed in immune cells is located within the 3′ UTR immediately after the stop codon, or within the 3′ UTR 15-20 nucleotides after the stop codon or within the 3′ UTR 70-80 nucleotides after the stop codon. In other embodiments, the 3′ UTR comprises more than one miRNA binding site (e.g., 2-4 miRNA binding sites), wherein there can be a spacer region (e.g., of 10-100, 20-70 or 30-50 nucleotides in length) between each miRNA binding site. In another embodiment, the 3′ UTR comprises a spacer region between the end of the miRNA binding site(s) and the poly A tail nucleotides. For example, a spacer region of 10-100, 20-70 or 30-50 nucleotides in length can be situated between the end of the miRNA binding site(s) and the beginning of the poly A tail.

[1127] In one embodiment, a codon optimized open reading frame encoding a polypeptide of interest comprises a start codon and the at least one microRNA binding site is located within the 5′ UTR 1-100 nucleotides before (upstream of) the start codon. In one embodiment, the codon optimized open reading frame encoding the polypeptide of interest comprises a start codon and the at least one microRNA binding site for a miR expressed in immune cells is located within the 5′ UTR 10-50 nucleotides before (upstream of) the start codon. In another embodiment, the codon optimized open reading frame encoding the polypeptide of interest comprises a start codon and the at least one microRNA binding site for a miR expressed in immune cells is located within the 5′ UTR at least 25 nucleotides before (upstream of) the start codon. In other embodiments, the codon optimized open reading frame encoding the polypeptide of interest comprises a start codon and the at least one microRNA binding site for a miR expressed in immune cells is located within the 5′ UTR immediately before the start codon, or within the 5′ UTR 15-20 nucleotides before the start codon or within the 5′ UTR 70-80 nucleotides before the start codon. In other embodiments, the 5′ UTR comprises more than one miRNA binding site (e.g., 2-4 miRNA binding sites), wherein there can be a spacer region (e.g., of 10-100, 20-70 or 30-50 nucleotides in length) between each miRNA binding site.

[1128] In one embodiment, the 3′ UTR comprises more than one stop codon, wherein at least one miRNA binding site is positioned downstream of the stop codons. For example, a 3′ UTR can comprise 1, 2 or 3 stop codons. Non-limiting examples of triple stop codons that can be used include: UGAUAAUAG (SEQ TD NO:210), UGAUAGUAA (SEQ TD NO:211), UAAUGAUAG (SEQ ID NO:212), UGAUAAUAA (SEQ ID NO:213), UGAUAGUAG (SEQ ID NO: 214), UAAUGAUGA (SEQ TD NO: 215), UAAUAGUAG (SEQ ID NO: 216), UGAUGAUGA (SEQ ID NO:217), UAAUAAUAA (SEQ ID NO:218), and UAGUAGUAG (SEQ TD NO: 219). Within a 3′ UTR, for example, 1, 2, 3 or 4 miRNA binding sites, e.g., miR-142-3p binding sites, can be positioned immediately adjacent to the stop codon(s) or at any number of nucleotides downstream of the final stop codon. When the 3′ UTR comprises multiple miRNA binding sites, these binding sites can be positioned directly next to each other in the construct (i.e., one after the other) or, alternatively, spacer nucleotides can be positioned between each binding site.

[1129] In one embodiment, the 3′ UTR comprises three stop codons with a single miR-142-3p binding site located downstream of the 3rd stop codon. Non-limiting examples of sequences of 3′ UTR having three stop codons and a single miR-142-3p binding site located at different positions downstream of the final stop codon are shown in SEQ TD NOs: 237, 248, 249, and 250.

TABLE 4A
5′ UTRs, 3′UTRs, miR sequences, and miR binding sites

| SEQ ID NO: | Sequence |
|---|---|
| 220 | GCUGGAGCCUCGGUGGCCAUGCUUCUUGCCCCUUGGGCCUCCCCCCAGCCCCUCCUC |
| | CCCUUCCUGCACCCGUACCCCCUCCAUAAAGUAGGAAACACUACAGUGGUCUUUGAA |
| | UAAAGUCUGAGUGGGCGGC |
| | (3′ UTR with miR 142-3p binding site) |
| 202 | UCCAUAAAGUAGGAAACACUACA |
| | (miR 142-3p binding site) |
| 201 | UGUAGUGUUUCCUACUUUAUGGA |
| | (miR 142-3p sequence) |
| 203 | CAUAAAGUAGAAAGCACUACU |
| | (miR 142-5p sequence) |
| 221 | CCUCUGAAAUUCAGUUCUUCAG |
| | (miR 146-3p sequence) |
| 222 | UGAGAACUGAAUUCCAUGGGUU |
| | (miR 146-5p sequence) |
| 223 | CUCCUACAUAUUAGCAUUAACA |
| | (miR 155-3p sequence) |
| 224 | UUAAUGCUAAUCGUGAUAGGGGU |
| | (miR 155-5p sequence) |
| 206 | UCGUACCGUGAGUAAUAAUGCG |
| | (miR 126-3p sequence) |
| 208 | CAUUAUUACUUUUGGUACGCG |
| | (miR 126-5p sequence) |
| 225 | CCAGUAUUAACUGUGCUGCUGA |
| | (miR 16-3p sequence) |
| 226 | UAGCAGCACGUAAAUAUUGGCG |
| | (miR 16-5p sequence) |
| 227 | CAACACCAGUCGAUGGGCUGU |
| | (miR 21-3p sequence) |
| 228 | UAGCUUAUCAGACUGAUGUUGA |
| | (miR 21-5p sequence) |
| 143 | UGUCAGUUUGUCAAAUACCCCA |
| | (miR 223-3p sequence) |
| 230 | CGUGUAUUUGACAAGCUGAGUU |
| | (miR 223-5p sequence) |
| 231 | UGGCUCAGUUCAGCAGGAACAG |
| | (miR 24-3p sequence) |
| 232 | UGCCUACUGAGCUGAUAUCAGU |
| | (miR 24-5p sequence) |
| 233 | UUCACAGUGGCUAAGUUCCGC |
| | (miR 27-3p sequence) |
| 234 | AGGGCUUAGCUGCUUGUGAGCA |
| | (miR 27-5p sequence) |
| 207 | CGCAUUAUUACUCACGGUACGA |
| | (miR 126-3p binding site) |
| 235 | UGAUAAUAGGCUGGAGCCUCGGUGGCCAUGCUUCUUGCCCCUUGGGCCUCCCCCCAG |
| | CCCCUCCUCCCCUUCCUGCACCCGUACCCCC [symbol] GUGG |
| | UCUUUGAAUAAAGUCUGAGUGGGCGGC |
| | (3′ UTR with miR 126-3p binding site) |
| 236 | UGAUAAUAGGCUGGAGCCUCGGUGGCCAUGCUUCUUGCCCCUUGGGCCUCCCCCCAG |
| | CCCCUCCUCCCCUUCCUGCACCCGUACCCCCGUGGUCUUUGAAUAAAGUCUGAGUGG |
| | GCGGC |
| | (3′ UTR, no miR binding sites) |
| 237 | UGAUAAUAGGCUGGAGCCUCGGUGGCCAUGCUUCUUGCCCCUUGGGCCUCCCCCCAG |
| | CCCCUCCUCCCCUUCCUGCACCCGUACCCCCUCCAUAAAGUAGGAAACACUACAGUG |
| | GUCUUUGAAUAAAGUCUGAGUGGGCGGC |
| | (3′ UTR with miR 142-3p binding site) |
| 199 | UGAUAAUAGUCCAUAAAGUAGGAAACACUACAGCUGGAGCCUCGGUGGCCAUGCUUC |
| | UUGCCCCUUGGGCCUCCCCCCAGCCCCUCCUCCCCUUCCUGCACCCGUACCCCC [symbol] |
| | [symbol] GUGGUCUUUGAAUAAAGUCUGAGUGGGCGGC |
| | (3′ UTR with miR 142-3p and miR 126-3p binding sites |
| | variant 1) |
| 239 | UUAAUGCUAAUUGUGAUAGGGGU |
| | (miR 155-5p sequence) |
| 240 | ACCCCUAUCACAAUUAGCAUUAA |
| | (miR 155-5p binding site) |
| 241 | UGAUAAUAGUCCAUAAAGUAGGAAACACUACAGCUGGAGCCUCGGUGGCCAUGCUUC |
| | UUGCCCCUUGGGCCUCCAUAAAGUAGGAAACACUACAUCCCCCCAGCCCCUCCUCCC |
| | CUUCCUGCACCCGUACCCCCUCCAUAAAGUAGGAAACACUACAGUGGUCUUUGAAUA |
| | AAGUCUGAGUGGGCGGC |
| | (3′ UTR with 3 miR 142-3p binding sites) |
| 242 | UGAUAAUAGGCUGGAGCCUCGGUGGCCAUGCUUCUUGCCCCUUGGGCCUCCCCCCAG |
| | CCCCUCCUCCCCUUCCUGCACCCGUACCCCC [symbol] GUGGU |
| | CUUUGAAUAAAGUCUGAGUGGGCGGC |
| | (3′ UTR with miR 142-5p binding site) |
| 243 | UGAUAAUAG [symbol] GCUGGAGCCUCGGUGGCCAUGCUUCUU |
| | GCCCCUUGGGCC [symbol] UCCCCCCAGCCCCUCCUCCCCUUC |
| | CUGCACCCGUACCCCC [symbol] GUGGUCUUUGAAUAAAGUCU |
| | GAGUGGGCGGC |
| | (3′ UTR with 3 miR 142-5p binding sites) |
| 244 | UGAUAAUAG [symbol] GCUGGAGCCUCGGUGGCCAUGCUUCUU |
| | GCCCCUUGGGCCUCCAUAAAGUAGGAAACACUACAUCCCCCCAGCCCCUCCUCCCCU |
| | UCCUGCACCCGUACCCCC [symbol] GUGGUCUUUGAAUAAAGU |
| | CUGAGUGGGCGGC |
| | (3′ UTR with 2 miR 142-5p binding sites and 1 miR 142-3p |
| | binding site) |
| 245 | UGAUAAUAGGCUGGAGCCUCGGUGGCCAUGCUUCUUGCCCCUUGGGCCUCCCCCCAG |
| | CCCCUCCUCCCCUUCCUGCACCCGUACCCCCACCCCUAUCACAAUUAGCAUUAAGUG |
| | GUCUUUGAAUAAAGUCUGAGUGGGGGC |
| | (3′ UTR with miR 155-5p binding site) |
| 246 | UGAUAAUAGACCCCUAUCACAAUUAGCAUUAAGCUGGAGCCUCGGUGGCCAUGCUUC |
| | UUGCCCCUUGGGCCACCCCUAUCACAAUUAGCAUUAAUCCCCCCAGCCCCUCCUCCC |
| | CUUCCUGCACCCGUACCCCCACCCCUAUCACAAUUAGCAUUAAGUGGUCUUUGAAUA |
| | AAGUCUGAGUGGGCGGC |
| | (3′ UTR with 3 miR 155-5p binding sites) |
| 247 | UGAUAAUAGACCCCUAUCACAAUUAGCAUUAAGCUGGAGCCUCGGUGGCCAUGCUUC |
| | UUGCCCCUUGGGCCUCCAUAAAGUAGGAAACACUACAUCCCCCCAGCCCCUCCUCCC |
| | CUUCCUGCACCCGUACCCCCACCCCUAUCACAAUUAGCAUUAAGUGGUCUUUGAAUA |
| | AAGUCUGAGUGGGCGGC |
| | (3′ UTR with 2 miR 155-5p binding sites and 1 miR 142-3p |
| | binding site) |
| 248 | UGAUAAUAGUCCAUAAAGUAGGAAACACUACAGCUGGAGCCUCGGUGGCCAUGCUUC |
| | UUGCCCCUUGGGCCUCCCCCCAGCCCCUCCUCCCCUUCCUGCACCCGUACCCCCGUG |
| | GUCUUUGAAUAAAGUCUGAGUGGGCGGC |
| | (3′ UTR with miR 142-3p binding site, P1 insertion) |
| 249 | UGAUAAUAGGCUGGAGCCUCGGUGGCUCCAUAAAGUAGGAAACACUACACAUGCUUC |
| | UUGCCCCUUGGGCCUCCCCCCAGCCCCUCCUCCCCUUCCUGCACCCGUACCCCCGUG |
| | GUCUUUGAAUAAAGUCUGAGUGGGCGGC |
| | (3′ UTR with miR 142-3p binding site, P2 insertion) |
| 250 | UGAUAAUAGGCUGGAGCCUCGGUGGCCAUGCUUCUUGCCCCUUGGGCCUCCAUAAAG |
| | UAGGAAACACUACAUCCCCCCAGCCCCUCCUCCCCUUCCUGCACCCGUACCCCCGUG |
| | GUCUUUGAAUAAAGUCUGAGUGGGCGGC |
| | (3′ UTR with miR 142-3p binding site, P3 insertion) |
| 204 | AGUAGUGCUUUCUACUUUAUG |
| | (miR-142-5p binding site) |
| 200 | GACAGUGCAGUCACCCAUAAAGUAGAAAGCACUACUAACAGCACUGGAGGGUGUAGU |
| | GUUUCCUACUUUAUGGAUGAGUGUACUGUG |
| | (miR-142) |
| 197 | GGGAAAUAAGAGAGAAAAGAAGAGUAAGAAGAAAUAUAAGAGCCACC |
| | (5′ UTR) |
| 251 | GGGAAAUAAGAGUCCAUAAAGUAGGAAACACUACAAGAAAAGAAGAGUAAGAAGAAA |
| | UAUAAGAGCCACC |
| | (5′ UTR with miR142-3p binding site at position p1) |
| 252 | GGGAAAUAAGAGAGAAAAGAAGAGUAAUCCAUAAAGUAGGAAACACUACAGAAGAAA |
| | UAUAAGAGCCACC |
| | (5′ UTR with miR142-3p binding site at position p2) |
| 253 | GGGAAAUAAGAGAGAAAAGAAGAGUAAGAAGAAAUAUAAUCCAUAAAGUAGGAAACA |
| | CUACAGAGCCACC |
| | (5′ UTR with miR142-3p binding site at position p3) |
| 254 | ACCCCUAUCACAAUUAGCAUUAA |
| | (miR 155-5p binding site) |
| 255 | UGAUAAUAG [symbol] GCUGGAGCCUCGGUGGCCAUGCUUCUU |
| | GCCCCUUGGGCC [symbol] UCCCCCCAGCCCCUCUCCCCUUCC |
| | UGCACCCGUACCCCC [symbol] GUGGUCUUUGAAUAAAGUCUG |
| | AGUGGGCGGC |
| | (3′ UTR with 3 miR 142-5p binding sites) |
| 256 | UGAUAAUAGGCUGGAGCCUCGGUGGCCAUGCUUCUUGCCCCUUCCAUAAAGUAGGAA |
| | ACACUACAUGGGCCUCCCCCCAGCCCCUCCUCCCCUUCCUGCACCCGUACCCCCGUG |
| | GUCUUUGAAUAAAGUCUGAGUGGGGGC |
| | (3′ UTR including miR142-3p binding site) |
| 257 | UGAUAAUAGGCUGGAGCCUCGGUGGCCAUGCUUCUUGCCCCUUGGGCCUCCCCCCAG |
| | UCCAUAAAGUAGGAAACACUACACCCCUCCUCCCCUUCCUGCACCCGUACCCCCGUG |
| | GUCUUUGAAUAAAGUCUGAGUGGGCGGC |
| | (3′ UTR including miR142-3p binding site) |
| 258 | UGAUAAUAGGCUGGAGCCUCGGUGGCCAUGCUUCUUGCCCCUUGGGCCUCCCCCCAG |
| | CCCCUCCUCCCCUUCUCCAUAAAGUAGGAAACACUACACUGCACCCGUACCCCCGUG |
| | GUCUUUGAAUAAAGUCUGAGUGGGCGGC |
| | (3′UTR including miR142-3p binding site) |
| 259 | UGAUAAUAGGCUGGAGCCUCGGUGGCCAUGCUUCUUGCCCCUUGGGCCUCCCCCCAG |
| | CCCCUCCUCCCCUUCCUGCACCCGUACCCCCGUGGUCUUUGAAUAAAGUUCCAUAAA |
| | GUAGGAAACACUACACUGAGUGGGCGGC |
| | (3′UTR including miR142-3p binding site) |
| 260 | UGAUAAUAGUCCAUAAAGUAGGAAACACUACAGCUGGAGCCUCGGUGGCCUAGCUUC |
| | UUGCCCCUUGGGCCUCCCCCCAGCCCCUCCUCCCCUUCCUGCACCCGUACCCCC [symbol] |
| | [symbol] GUGGUCUUUGAAUAAAGUCUGAGUGGGCGGC |
| | (3′ UTR with miR 142-3p and miR 126-3p binding sites |
| | variant 2) |
| 261 | UGAUAAUAGGCUGGAGCCUCGGUGGCCUAGCUUCUUGCCCCUUGGGCCUCCCCCCAG |
| | CCCCUCCUCCCCUUCCUGCACCCGUACCCCCGUGGUCUUUGAAUAAAGUCUGAGUGG |
| | GCGGC |
| | (3′ UTR, no miR binding sites variant 2) |
| 198 | UGAUAAUAGGCUGGAGCCUCGGUGGCCUAGCUUCUUGCCCCUUGGGCCUCCCCCCAG |
| | CCCCUCCUCCCCUUCCUGCACCCGUACCCCCUCCAUAAAGUAGGAAACACUACAGUG |
| | GUCUUUGAAUAAAGUCUGAGUGGGCGGC |
| | (3′ UTR with miR 142-3p binding site variant 3) |
| 262 | UGAUAAUAGGCUGGAGCCUCGGUGGCCUAGCUUCUUGCCCCUUGGGCCUCCCCCCAG |
| | CCCCUCCUCCCCUUCCUGCACCCGUACCCCC [symbol] GUGG |
| | UCUUUGAAUAAAGUCUGAGUGGGCGGC |
| | (3′ UTR with miR 126-3p binding site variant 3) |
| 263 | UGAUAAUAGUCCAUAAAGUAGGAAACACUACAGCUGGAGCCUCGGUGGCCUAGCUUC |
| | UUGCCCCUUGGGCCUCCAUAAAGUAGGAAACACUACAUCCCCCCAGCCCCUCCUCCC |
| | CUUCCUGCACCCGUACCCCCUCCAUAAAGUAGGAAACACUACAGUGGUCUUUGAAUA |
| | AAGUCUGAGUGGGCGGC |
| | (3′ UTR with 3 miR 142-3p binding sites variant 2) |
| 264 | UGAUAAUAGUCCAUAAAGUAGGAAACACUACAGCUGGAGCCUCGGUGGCCUAGCUUC |
| | UUGCCCCUUGGGCCUCCCCCCAGCCCCUCCUCCCCUUCCUGCACCCGUACCCCCGUG |
| | GUCUUUGAAUAAAGUCUGAGUGGGCGGC |
| | (3′UTR with miR 142-3p binding site, P1 insertion variant |
| | 2) |
| 265 | UGAUAAUAGGCUGGAGCCUCGGUGGCUCCAUAAAGUAGGAAACACUACACUAGCUUC |
| | UUGCCCCUUGGGCCUCCCCCCAGCCCCUCCUCCCCUUCCUGCACCCGUACCCCCGUG |
| | GUCUUUGAAUAAAGUCUGAGUGGGCGGC |
| | (3′ UTR with miR 142-3p binding site, P2 insertion variant |
| | 2) |
| 266 | UGAUAAUAGGCUGGAGCCUCGGUGGCCUAGCUUCUUGCCCCUUGGGCCUCCAUAAAG |
| | UAGGAAACACUACAUCCCCCCAGCCCCUCCUCCCCUUCCUGCACCCGUACCCCCGUG |
| | GUCUUUGAAUAAAGUCUGAGUGGGCGGC |
| | (3′ UTR with miR 142-3p binding site, P3 insertion variant |
| | 2) |
| 267 | UGAUAAUAGGCUGGAGCCUCGGUGGCCUAGCUUCUUGCCCCUUGGGCCUCCCCCCAG |
| | CCCCUCCUCCCCUUCCUGCACCCGUACCCCCACCCCUAUCACAAUUAGCAUUAAGUG |
| | GUCUUUGAAUAAAGUCUGAGUGGGCGGC |
| | (3′UTR with miR 155-5p binding site variant 2) |
| 268 | UGAUAAUAGACCCCUAUCACAAUUAGCAUUAAGCUGGAGCCUCGGUGGCCUAGCUUC |
| | UUGCCCCUUGGGCCACCCCUAUCACAAUUAGCAUUAAUCCCCCCAGCCCCUCCUCCC |
| | CUUCCUGCACCCGUACCCCCACCCCUAUCACAAUUAGCAUUAAGUGGUCUUUGAAUA |
| | AAGUCUGAGUGGGCGGC |
| | (3′ UTR with 3 miR 155-5p binding sites variant 2) |
| 269 | UGAUAAUAGACCCCUAUCACAAUUAGCAUUAAGCUGGAGCCUCGGUGGCCUAGCUUC |
| | UUGCCCCUUGGGCCUCCAUAAAGUAGGAAACACUACAUCCCCCCAGCCCCUCCUCCC |
| | CUUCCUGCACCCGUACCCCCACCCCUAUCACAAUUAGCAUUAAGUGGUCUUUGAAUA |
| | AAGUCUGAGUGGGCGGC |
| | (3′UTR with 2 miR 155-5p binding sites and 1 miR 142-3p |
| | binding site variant 2) |
| 271 | AGGAAAUAAGAGAGAAAAGAAGAGUAAGAAGAAAUAUAAGAGCCACC |
| | 5′-UTR (v1 plus A-start) |
| 272 | GGGAAAUAAGAGAGAAAAGAAGAGUAAGAAGAAAUAUAAGACCCCGGCGCCGCCACC |
| | (5′ UTR v1.1 plus G-start) |
| 273 | AGGAAAUAAGAGAGAAAAGAAGAGUAAGAAGAAAUAUAAGACCCCGGCGCCGCCACC |
| | (5′UTR v1.1 plus A-start) |
| 274 | GGGAGAUCAGAGAGAAAAGAAGAGUAAGAAGAAAUAUAAGAGCCACC |
| | 5′ UTR 002 (upstream UTR plus G-start) |
| 80 | GGGAGACAAGCUUGGCAUUCCGGUACUGUUGGUAAAGCCACC |
| | 5′ UTR-004 (Upstream UTR plus G-start) |
| 81 | GGGAAUUAACAGAGAAAAGAAGAGUAAGAAGAAAUAUAAGAGCCACC |
| | 5′ UTR-008 (Upstream UTR plus G-start) |
| 82 | GGGAAAUUAGACAGAAAAGAAGAGUAAGAAGAAAUAUAAGAGCCACC |
| | 5′ UTR-009 (Upstream UTR plus G-start) |
| 83 | GGGAAAUAAGAGAGUAAAGAACAGUAAGAAGAAAUAUAAGAGCCACC |
| | 5′ UTR-010, (Upstream UTR plus G-start) |
| 84 | GGGAAAAAAGAGAGAAAAGAAGACUAAGAAGAAAUAUAAGAGCCACC |
| | 5′ UTR-011 (Upstream UTR plus G-start) |
| 85 | GGGAAAUAAGAGAGAAAAGAAGAGUAAGAAGAUAUAUAAGAGCCACC |
| | 5′ UTR-012 (Upstream UTR plus G-start) |
| 86 | GGGAAAUAAGAGACAAAACAAGAGUAAGAAGAAAUAUAAGAGCCACC |
| | 5′ UTR-013 (Upstream UTR plus G-start) |
| 87 | GGGAAAUUAGAGAGUAAAGAACAGUAAGUAGAAUUAAAAGAGCCACC |
| | 5′ UTR-014 (Upstream UTR plus G-start) |
| 88 | GGGAAAUAAGAGAGAAUAGAAGAGUAAGAAGAAAUAUAAGAGCCACC |
| | 5′ UTR-015 (Upstream UTR plus G-start) |
| 89 | GGGAAAUAAGAGAGAAAAGAAGAGUAAGAAGAAAAUUAAGAGCCACC |
| | 5′ UTR-016 (Upstream UTR plus G-start) |
| 90 | GGGAAAUAAGAGAGAAAAGAAGAGUAAGAAGAAAUUUAAGAGCCACC |
| | 5′ UTR-017 (Upstream UTR plus G-start) |
| 91 | UCAAGCUUUUGGACCCUCGUACAGAAGCUAAUACGACUCACUAUAGGGAAAUAAGAG |
| | AGAAAAGAAGAGUAAGAAGAAAUAUAAGAGCCACC |
| | 5′ UTR-018 (Upstream UTR) |

Stop codon = bold
miR 142-3p binding site = underline
miR 126-3p binding site = bold underline
miR 155-5p binding site = italicized
miR 142-5p binding site = italicized and bold underline

[1130] In one embodiment, the polynucleotide of the invention comprises a 5′ UTR, a codon optimized open reading frame encoding a polypeptide of interest, a 3′ UTR comprising the at least one miRNA binding site for a miR expressed in immune cells, and a 3′ tailing region of linked nucleosides. In various embodiments, the 3′ UTR comprises 1-4, at least two, one, two, three or four miRNA binding sites for miRs expressed in immune cells, preferably abundantly or preferentially expressed in immune cells.

[1131] In one embodiment, the at least one miRNA expressed in immune cells is a miR-142-3p microRNA binding site. In one embodiment, the miR-142-3p microRNA binding site comprises the sequence shown in SEQ ID NO: 202. In one embodiment, the 3′ UTR of the mRNA comprising the miR-142-3p microRNA binding site comprises the sequence shown in SEQ ID NO: 220.

[1132] In one embodiment, the at least one miRNA expressed in immune cells is a miR-126 microRNA binding site. In one embodiment, the miR-126 binding site is a miR-126-3p binding site. In one embodiment, the miR-126-3p microRNA binding site comprises the sequence shown in SEQ ID NO: 207. In one embodiment, the 3′ UTR of the mRNA of the invention comprising the miR-126-3p microRNA binding site comprises the sequence shown in SEQ ID NO: 235.

[1133] Non-limiting exemplary sequences for miRs to which a microRNA binding site(s) of the disclosure can bind include the following: miR-142-3p (SEQ ID NO: 201), miR-142-5p (SEQ ID NO: 203), miR-146-3p (SEQ ID NO: 221), miR-146-5p (SEQ ID NO: 222), miR-155-3p (SEQ ID NO: 223), miR-155-5p (SEQ ID NO: 224), miR-126-3p (SEQ ID NO: 206), miR-126-5p (SEQ ID NO: 208), miR-16-3p (SEQ ID NO: 225), miR-16-5p (SEQ ID NO: 226), miR-21-3p (SEQ ID NO: 227), miR-21-5p (SEQ ID NO: 228), miR-223-3p (SEQ ID NO: 143), miR-223-5p (SEQ ID NO: 230), miR-24-3p (SEQ ID NO: 231), miR-24-5p (SEQ ID NO: 232), miR-27-3p (SEQ ID NO: 233) and miR-27-5p (SEQ ID NO: 234). Other suitable miR sequences expressed in immune cells (e.g., abundantly or preferentially expressed in immune cells) are known and available in the art, for example at the University of Manchester's microRNA database, miRBase. Sites that bind any of the aforementioned miRs can be designed based on Watson-Crick complementarity to the miR, typically 100% complementarity to the miR, and inserted into an mRNA construct of the disclosure as described herein.

[1134] In another embodiment, a polynucleotide of the present invention (e.g., and mRNA, e.g., the 3′ UTR thereof) can comprise at least one miRNA binding site to thereby reduce or inhibit accelerated blood clearance, for example by reducing or inhibiting production of IgMs, e.g., against PEG, by B cells and/or reducing or inhibiting proliferation and/or activation of pDCs, and can comprise at least one miRNA binding site for modulating tissue expression of an encoded protein of interest.

[1135] miRNA gene regulation can be influenced by the sequence surrounding the miRNA such as, but not limited to, the species of the surrounding sequence, the type of sequence (e.g., heterologous, homologous, exogenous, endogenous, or artificial), regulatory elements in the surrounding sequence and/or structural elements in the surrounding sequence. The miRNA can be influenced by the 5′UTR and/or 3′UTR. As a non-limiting example, a non-human 3′UTR can increase the regulatory effect of the miRNA sequence on the expression of a polypeptide of interest compared to a human 3′ UTR of the same sequence type.

[1136] In one embodiment, other regulatory elements and/or structural elements of the 5′ UTR can influence miRNA mediated gene regulation. One example of a regulatory element and/or structural element is a structured IRES (Internal Ribosome Entry Site) in the 5′ UTR, which is necessary for the binding of translational elongation factors to initiate protein translation. EIF4A2 binding to this secondarily structured element in the 5′-UTR is necessary for miRNA mediated gene expression (Meijer H A et al., Science, 2013, 340, 82-85, herein incorporated by reference in its entirety). The polynucleotides of the invention can further include this structured 5′ UTR to enhance microRNA mediated gene regulation.

[1137] At least one miRNA binding site can be engineered into the 3′ UTR of a polynucleotide of the invention. In this context, at least two, at least three, at least four, at least five, at least six, at least seven, at least eight, at least nine, at least ten, or more miRNA binding sites can be engineered into a 3′ UTR of a polynucleotide of the invention. For example, 1 to 10, 1 to 9, 1 to 8, 1 to 7, 1 to 6, 1 to 5, 1 to 4, 1 to 3, 2, or 1 miRNA binding sites can be engineered into the 3′UTR of a polynucleotide of the invention. In one embodiment, miRNA binding sites incorporated into a polynucleotide of the invention can be the same or can be different miRNA sites. A combination of different miRNA binding sites incorporated into a polynucleotide of the invention can include combinations in which more than one copy of any of the different miRNA sites are incorporated. In another embodiment, miRNA binding sites incorporated into a polynucleotide of the invention can target the same or different tissues in the body. As a non-limiting example, through the introduction of tissue-, cell-type-, or disease-specific miRNA binding sites in the 3′-UTR of a polynucleotide of the invention, the degree of expression in specific cell types (e.g., myeloid cells, endothelial cells, etc.) can be reduced.

[1138] In one embodiment, a miRNA binding site can be engineered near the 5′ terminus of the 3′UTR, about halfway between the 5′ terminus and 3′ terminus of the 3′UTR and/or near the 3′ terminus of the 3′ UTR in a polynucleotide of the invention. As a non-limiting example, a miRNA binding site can be engineered near the 5′ terminus of the 3′UTR and about halfway between the 5′ terminus and 3′ terminus of the 3′UTR. As another non-limiting example, a miRNA binding site can be engineered near the 3′ terminus of the 3′UTR and about halfway between the 5′ terminus and 3′ terminus of the 3′ UTR. In another non-limiting example, a miRNA binding site can be engineered near the 5′ terminus of the 3′ UTR and near the 3′ terminus of the 3′ UTR.

[1139] In another embodiment, a 3′ UTR can comprise 1, 2, 3, 4, 5, 6, 7, 8, 9, or 10 miRNA binding sites. The miRNA binding sites can be complementary to a miRNA, miRNA seed sequence, and/or miRNA sequences flanking the seed sequence.

[1140] In some embodiments, the expression of a polynucleotide of the invention can be controlled by incorporating at least one sensor sequence in the polynucleotide and formulating the polynucleotide for administration. As a non-limiting example, a polynucleotide of the invention can be targeted to a tissue or cell by incorporating a miRNA binding site and formulating the polynucleotide in a lipid nanoparticle comprising a ionizable lipid, including any of the lipids described herein.

[1141] A polynucleotide of the invention can be engineered for more targeted expression in specific tissues, cell types, or biological conditions based on the expression patterns of miRNAs in the different tissues, cell types, or biological conditions. Through introduction of tissue-specific miRNA binding sites, a polynucleotide of the invention can be designed for optimal protein expression in a tissue or cell, or in the context of a biological condition.

[1142] In some embodiments, a polynucleotide of the invention can be designed to incorporate miRNA binding sites that either have 100% identity to known miRNA seed sequences or have less than 100% identity to miRNA seed sequences. In some embodiments, a polynucleotide of the invention can be designed to incorporate miRNA binding sites that have at least: 60%, 65%, 70%, 75%, 80%, 85%, 90%, 95%, 96%, 97%, 98%, or 99% identity to known miRNA seed sequences. The miRNA seed sequence can be partially mutated to decrease miRNA binding affinity and as such result in reduced downmodulation of the polynucleotide. In essence, the degree of match or mis-match between the miRNA binding site and the miRNA seed can act as a rheostat to more finely tune the ability of the miRNA to modulate protein expression. In addition, mutation in the non-seed region of a miRNA binding site can also impact the ability of a miRNA to modulate protein expression.

[1143] In one embodiment, a miRNA sequence can be incorporated into the loop of a stem loop.

[1144] In another embodiment, a miRNA seed sequence can be incorporated in the loop of a stem loop and a miRNA binding site can be incorporated into the 5′ or 3′ stem of the stem loop.

[1145] In one embodiment the miRNA sequence in the 5′ UTR can be used to stabilize a polynucleotide of the invention described herein.

[1146] In another embodiment, a miRNA sequence in the 5′ UTR of a polynucleotide of the invention can be used to decrease the accessibility of the site of translation initiation such as, but not limited to a start codon. See, e.g., Matsuda et al., PLoS One. 2010 11(5):e15057; incorporated herein by reference in its entirety, which used antisense locked nucleic acid (LNA) oligonucleotides and exon-junction complexes (EJCs) around a start codon (−4 to +37 where the A of the AUG codons is +1) to decrease the accessibility to the first start codon (AUG).

[1147] Matsuda showed that altering the sequence around the start codon with an LNA or EJC affected the efficiency, length and structural stability of a polynucleotide. A polynucleotide of the invention can comprise a miRNA sequence, instead of the LNA or EJC sequence described by Matsuda et al, near the site of translation initiation to decrease the accessibility to the site of translation initiation. The site of translation initiation can be prior to, after or within the miRNA sequence. As a non-limiting example, the site of translation initiation can be located within a miRNA sequence such as a seed sequence or binding site.

[1148] In some embodiments, a polynucleotide of the invention can include at least one miRNA to dampen the antigen presentation by antigen presenting cells. The miRNA can be the complete miRNA sequence, the miRNA seed sequence, the miRNA sequence without the seed, or a combination thereof. As a non-limiting example, a miRNA incorporated into a polynucleotide of the invention can be specific to the hematopoietic system. As another non-limiting example, a miRNA incorporated into a polynucleotide of the invention to dampen antigen presentation is miR-142-3p.

[1149] In some embodiments, a polynucleotide of the invention can include at least one miRNA to dampen expression of the encoded polypeptide in a tissue or cell of interest. As a non-limiting example, a polynucleotide of the invention can include at least one miR-142-3p binding site, miR-142-3p seed sequence, miR-142-3p binding site without the seed, miR-142-5p binding site, miR-142-5p seed sequence, miR-142-5p binding site without the seed, miR-146 binding site, miR-146 seed sequence and/or miR-146 binding site without the seed sequence.

[1150] In some embodiments, a polynucleotide of the invention can comprise at least one miRNA binding site in the 3′UTR to selectively degrade mRNA therapeutics in the immune cells to subdue unwanted immunogenic reactions caused by therapeutic delivery. As a non-limiting example, the miRNA binding site can make a polynucleotide of the invention more unstable in antigen presenting cells. Non-limiting examples of these miRNAs include miR-142-5p, miR-142-3p, miR-146a-5p, and miR-146-3p.

[1151] In one embodiment, a polynucleotide of the invention comprises at least one miRNA sequence in a region of the polynucleotide that can interact with a RNA binding protein. In some embodiments, the polynucleotide of the invention (e.g., a RNA, e.g., an mRNA) comprising (i) a sequence-optimized nucleotide sequence (e.g., an ORF) encoding an immune checkpoint inhibitor polypeptide (e.g., the wild-type sequence, functional fragment, or variant thereof) and (ii) a miRNA binding site (e.g., a miRNA binding site that binds to miR-142) and/or a miRNA binding site that binds to miR-126.

### IVT Polynucleotide Architecture

[1152] In some embodiments, the polynucleotide of the present disclosure comprising an mRNA encoding an ITB6 molecule polypeptide is an IVT polynucleotide. Traditionally, the basic components of an mRNA molecule include at least a coding region, a 5′UTR, a 3′UTR, a 5′ cap and a poly-A tail. The IVT polynucleotides of the present disclosure can function as mRNA but are distinguished from wild-type mRNA in their functional and/or structural design features which serve, e.g., to overcome existing problems of effective polypeptide production using nucleic-acid based therapeutics.

[1153] The primary construct of an IVT polynucleotide comprises a first region of linked nucleotides that is flanked by a first flanking region and a second flaking region. This first region can include, but is not limited to, the encoded immune checkpoint inhibitor molecule polypeptide. The first flanking region can include a sequence of linked nucleosides which function as a 5′ untranslated region (UTR) such as the 5′ UTR of any of the nucleic acids encoding the native 5′ UTR of the polypeptide or a non-native 5′UTR such as, but not limited to, a heterologous 5′ UTR or a synthetic 5′ UTR. The IVT encoding an immune checkpoint inhibitor molecule polypeptide can comprise at its 5 terminus a signal sequence region encoding one or more signal sequences. The flanking region can comprise a region of linked nucleotides comprising one or more complete or incomplete 5′ UTRs sequences. The flanking region can also comprise a 5′ terminal cap. The second flanking region can comprise a region of linked nucleotides comprising one or more complete or incomplete 3′ UTRs which can encode the native 3′ UTR of an immune checkpoint inhibitor molecule polypeptide or a non-native 3′ UTR such as, but not limited to, a heterologous 3′ UTR or a synthetic 3′ UTR. The flanking region can also comprise a 3′ tailing sequence. The 3′ tailing sequence can be, but is not limited to, a polyA tail, a polyA-G quartet and/or a stem loop sequence.

[1154] Additional and exemplary features of IVT polynucleotide architecture are disclosed in International PCT application WO 2017/201325, filed on 18 May 2017, the entire contents of which are hereby incorporated by reference.

### 5′UTR and 3′ UTR

[1155] A UTR can be homologous or heterologous to the coding region in a polynucleotide. In some embodiments, the UTR is homologous to the ORF encoding an ITB6 molecule. In some embodiments, the UTR is heterologous to the ORF encoding an ITB6 molecule.

[1156] In some embodiments, the polynucleotide comprises two or more 5′ UTRs or functional fragments thereof, each of which has the same or different nucleotide sequences. In some embodiments, the polynucleotide comprises two or more 3′ UTRs or functional fragments thereof, each of which has the same or different nucleotide sequences.

[1157] In some embodiments, the 5′ UTR or functional fragment thereof, 3′ UTR or functional fragment thereof, or any combination thereof is sequence optimized.

[1158] In some embodiments, the 5′UTR or functional fragment thereof, 3′ UTR or functional fragment thereof, or any combination thereof comprises at least one chemically modified nucleobase, e.g., N1-methylpseudouracil or 5-methoxyuracil.

[1159] UTRs can have features that provide a regulatory role, e.g., increased or decreased stability, localization and/or translation efficiency. A polynucleotide comprising a UTR can be administered to a cell, tissue, or organism, and one or more regulatory features can be measured using routine methods. In some embodiments, a functional fragment of a 5′ UTR or 3′ UTR comprises one or more regulatory features of a full length 5′ or 3′ UTR, respectively.

[1160] Natural 5′UTRs bear features that play roles in translation initiation. They harbor signatures like Kozak sequences that are commonly known to be involved in the process by which the ribosome initiates translation of many genes. Kozak sequences have the consensus CCR(A/G)CCAUGG (SEQ ID NO:87), where R is a purine (adenine or guanine) three bases upstream of the start codon (AUG), which is followed by another ‘G’. 5′ UTRs also have been known to form secondary structures that are involved in elongation factor binding.

[1161] By engineering the features typically found in abundantly expressed genes of specific target organs, one can enhance the stability and protein production of a polynucleotide. For example, introduction of 5′ UTR of liver-expressed mRNA, such as albumin, serum amyloid A, Apolipoprotein A/B/E, transferrin, alpha fetoprotein, erythropoietin, or Factor VIII, can enhance expression of polynucleotides in hepatic cell lines or liver. Likewise, use of 5′UTR from other tissue-specific mRNA to improve expression in that tissue is possible for muscle (e.g., MyoD, Myosin, Myoglobin, Myogenin, Herculin), for endothelial cells (e.g., Tie-1, CD36), for myeloid cells (e.g., C/EBP, AML1, G-CSF, GM-CSF, CD11b, MSR, Fr-1, i-NOS), for leukocytes (e.g., CD45, CD18), for adipose tissue (e.g., CD36, GLUT4, ACRP30, adiponectin) and for lung epithelial cells (e.g., SP-A/B/C/D).

[1162] In some embodiments, UTRs are selected from a family of transcripts whose proteins share a common function, structure, feature or property. For example, an encoded polypeptide can belong to a family of proteins (i.e., that share at least one function, structure, feature, localization, origin, or expression pattern), which are expressed in a particular cell, tissue or at some time during development. The UTRs from any of the genes or mRNA can be swapped for any other UTR of the same or different family of proteins to create a new polynucleotide.

[1163] In some embodiments, the 5′ UTR and the 3′ UTR can be heterologous. In some embodiments, the 5′ UTR can be derived from a different species than the 3′ UTR. In some embodiments, the 3′ UTR can be derived from a different species than the 5′ UTR.

[1164] Co-owned International Patent Application No. PCT/US2014/021522 (Publ. No. WO/2014/164253, incorporated herein by reference in its entirety) provides a listing of exemplary UTRs that can be utilized in the polynucleotide of the present invention as flanking regions to an ORF.

[1165] Additional exemplary UTRs of the application include, but are not limited to, one or more 5′UTR and/or 3′UTR derived from the nucleic acid sequence of: a globin, such as an α- or β-globin (e.g., a Xenopus, mouse, rabbit, or human globin); a strong Kozak translational initiation signal; a CYBA (e.g., human cytochrome b-245 α polypeptide); an albumin (e.g., human albumin7); a HSD17B4 (hydroxysteroid (17-β) dehydrogenase); a virus (e.g., a tobacco etch virus (TEV), a Venezuelan equine encephalitis virus (VEEV), a Dengue virus, a cytomegalovirus (CMV) (e.g., CMV immediate early 1 (IE1)), a hepatitis virus (e.g., hepatitis B virus), a sindbis virus, or a PAV barley yellow dwarf virus); a heat shock protein (e.g., hsp70); a translation initiation factor (e.g., elF4G); a glucose transporter (e.g., hGLUT1 (human glucose transporter 1)); an actin (e.g., human α or β actin); a GAPDH; a tubulin; a histone; a citric acid cycle enzyme; a topoisomerase (e.g., a 5′UTR of a TOP gene lacking the 5′ TOP motif (the oligopyrimidine tract)); a ribosomal protein Large 32 (L32); a ribosomal protein (e.g., human or mouse ribosomal protein, such as, for example, rps9); an ATP synthase (e.g., ATP5A1 or the β subunit of mitochondrial H⁺-ATP synthase); a growth hormone e (e.g., bovine (bGH) or human (hGH)); an elongation factor (e.g., elongation factor 1 α1 (EEF1A1)); a manganese superoxide dismutase (MnSOD); a myocyte enhancer factor 2A (MEF2A); a 3-F1-ATPase, a creatine kinase, a myoglobin, a granulocyte-colony stimulating factor (G-CSF); a collagen (e.g., collagen type I, alpha 2 (Col1A2), collagen type I, alpha 1 (Col1A1), collagen type VI, alpha 2 (Col6A2), collagen type VI, alpha 1 (Col6A1)); a ribophorin (e.g., ribophorin I (RPNI)); a low density lipoprotein receptor-related protein (e.g., LRP1); a cardiotrophin-like cytokine factor (e.g., Nnt1); calreticulin (Calr); a procollagen-lysine, 2-oxoglutarate 5-dioxygenase 1 (Plod1); and a nucleobindin (e.g., Nucb1).

[1166] In some embodiments, the 5′ UTR is selected from the group consisting of a β-globin 5′ UTR; a 5′UTR containing a strong Kozak translational initiation signal; a cytochrome b-245 α polypeptide (CYBA) 5′ UTR; a hydroxysteroid (17-β) dehydrogenase (HSD17B4) 5′ UTR; a Tobacco etch virus (TEV) 5′ UTR; a Venezuelan equine encephalitis virus (TEEV) 5′ UTR; a 5′ proximal open reading frame of rubella virus (RV) RNA encoding nonstructural proteins; a Dengue virus (DEN) 5′ UTR; a heat shock protein 70 (Hsp70) 5′ UTR; a eIF4G 5′ UTR; a GLUT1 5′ UTR; functional fragments thereof and any combination thereof.

[1167] In some embodiments, the 3′ UTR is selected from the group consisting of a β-globin 3′ UTR; a CYBA 3′ UTR; an albumin 3′ UTR; a growth hormone (GH) 3′ UTR; a VEEV 3′ UTR; a hepatitis B virus (HBV) 3′ UTR; α-globin 3′UTR; a DEN 3′ UTR; a PAV barley yellow dwarf virus (BYDV-PAV) 3′ UTR; an elongation factor 1 α1 (EEF1A1) 3′ UTR; a manganese superoxide dismutase (MnSOD) 3′ UTR; a β subunit of mitochondrial H(+)-ATP synthase (β-mRNA) 3′ UTR; a GLUT1 3′ UTR; a MEF2A 3′ UTR; a β-F1-ATPase 3′ UTR; functional fragments thereof and combinations thereof.

[1168] Wild-type UTRs derived from any gene or mRNA can be incorporated into the polynucleotides of the invention. In some embodiments, a UTR can be altered relative to a wild type or native UTR to produce a variant UTR, e.g., by changing the orientation or location of the UTR relative to the ORF; or by inclusion of additional nucleotides, deletion of nucleotides, swapping or transposition of nucleotides. In some embodiments, variants of 5′ or 3′ UTRs can be utilized, for example, mutants of wild type UTRs, or variants wherein one or more nucleotides are added to or removed from a terminus of the UTR.

[1169] Additionally, one or more synthetic UTRs can be used in combination with one or more non-synthetic UTRs. See, e.g., Mandal and Rossi, Nat. Protoc. 2013 8(3):568-82, the contents of which are incorporated herein by reference in their entirety.

[1170] UTRs or portions thereof can be placed in the same orientation as in the transcript from which they were selected or can be altered in orientation or location. Hence, a 5′ and/or 3′ UTR can be inverted, shortened, lengthened, or combined with one or more other 5′ UTRs or 3′ UTRs. In some embodiments, the polynucleotide comprises multiple UTRs, e.g., a double, a triple or a quadruple 5′ UTR or 3′ UTR. For example, a double UTR comprises two copies of the same UTR either in series or substantially in series. For example, a double beta-globin 3′UTR can be used (see US2010/0129877, the contents of which are incorporated herein by reference in its entirety).

[1171] In certain embodiments, the 5′ UTR and/or 3′ UTR sequence of the invention comprises a nucleotide sequence at least about 60%, at least about 70%, at least about 80%, at least about 90%, at least about 95%, at least about 96%, at least about 97%, at least about 98%, at least about 99%, or about 100% identical to a sequence selected from the group consisting of 5′ UTR sequences comprising any of the 5′ UTR or 3′ UTR sequences disclosed herein (e.g., in Table A or Table B), and any combination thereof.

[1172] The polynucleotides of the invention can comprise combinations of features. For example, the ORF can be flanked by a 5′ UTR that comprises a strong Kozak translational initiation signal and/or a 3′ UTR comprising an oligo(dT) sequence for templated addition of a poly-A tail. A 5′ UTR can comprise a first polynucleotide fragment and a second polynucleotide fragment from the same and/or different UTRs (see, e.g., US2010/0293625, herein incorporated by reference in its entirety).

[1173] Other non-UTR sequences can be used as regions or subregions within the polynucleotides of the invention. For example, introns or portions of intron sequences can be incorporated into the polynucleotides of the invention. Incorporation of intronic sequences can increase protein production as well as polynucleotide expression levels. In some embodiments, the polynucleotide of the invention comprises an internal ribosome entry site (IRES) instead of or in addition to a UTR (see, e.g., Yakubov et al., Biochem. Biophys. Res. Commun. 2010 394(1):189-193, the contents of which are incorporated herein by reference in their entirety). In some embodiments, the polynucleotide comprises an IRES instead of a 5′ UTR sequence. In some embodiments, the polynucleotide comprises an ORF and a viral capsid sequence. In some embodiments, the polynucleotide comprises a synthetic 5′ UTR in combination with a non-synthetic 3′ UTR.

[1174] In some embodiments, the UTR can also include at least one translation enhancer polynucleotide, translation enhancer element, or translational enhancer elements (collectively, “TEE,” which refers to nucleic acid sequences that increase the amount of polypeptide or protein produced from a polynucleotide. As a non-limiting example, the TEE can be located between the transcription promoter and the start codon. In some embodiments, the 5′ UTR comprises a TEE. In one aspect, a TEE is a conserved element in a UTR that can promote translational activity of a nucleic acid such as, but not limited to, cap-dependent or cap-independent translation.

### a. 5′ UTR Sequences

[1175] 5′ UTR sequences are important for ribosome recruitment to the mRNA and have been reported to play a role in translation (Hinnebusch A, et al., (2016) Science, 352:6292: 1413-6).

[1176] Disclosed herein, inter alia, is a polynucleotide, e.g., mRNA, comprising an open reading frame encoding an ITB6 polypeptide (e.g., as described herein) encoding a polypeptide, wherein the polynucleotide has a 5′ UTR that confers an increased half-life, increased expression and/or increased activity of the polypeptide encoded by said polynucleotide, or of the polynucleotide itself. In an embodiment, a polynucleotide disclosed herein comprises: (a) a 5′-UTR (e.g., as provided in Table A or a variant or fragment thereof); (b) a coding region comprising a stop element (e.g., as described herein); and (c) a 3′-UTR (e.g., as described herein), and LNP compositions comprising the same. In an embodiment, the polynucleotide comprises a 5′-UTR comprising a sequence provided in Table A or a variant or fragment thereof (e.g., a functional variant or fragment thereof).

[1177] In an embodiment, the polynucleotide having a 5′ UTR sequence provided in Table A or a variant or fragment thereof, has an increase in the half-life of the polynucleotide, e.g., about 1.5-20-fold increase in half-life of the polynucleotide. In an embodiment, the increase in half-life is about 1.5, 2, 3, 4, 5, 6, 7, 8, 9, 10, 11, 12, 13, 14, 15, 16, 17, 18, 19, or 20-fold, or more. In an embodiment, the increase in half life is about 1.5-fold or more. In an embodiment, the increase in half life is about 2-fold or more. In an embodiment, the increase in half life is about 3-fold or more. In an embodiment, the increase in half life is about 4-fold or more. In an embodiment, the increase in half life is about 5-fold or more.

[1178] In an embodiment, the polynucleotide having a 5′ UTR sequence provided in Table A or a variant or fragment thereof, results in an increased level and/or activity, e.g., output, of the polypeptide encoded by the polynucleotide. In an embodiment, the 5′ UTR results in about 1.5-20-fold increase in level and/or activity, e.g., output, of the polypeptide encoded by the polynucleotide. In an embodiment, the increase in level and/or activity is about 1.5, 2, 3, 4, 5, 6, 7, 8, 9, 10, 11, 12, 13, 14, 15, 16, 17, 18, 19, or 20-fold, or more. In an embodiment, the increase in level and/or activity is about 1.5-fold or more. In an embodiment, the increase in level and/or activity is about 2-fold or more. In an embodiment, the increase in level and/or activity is about 3-fold or more. In an embodiment, the increase in level and/or activity is about 4-fold or more. In an embodiment, the increase in level and/or activity is about 5-fold or more.

[1179] In an embodiment, the increase is compared to an otherwise similar polynucleotide which does not have a 5′ UTR, has a different 5′ UTR, or does not have a 5′ UTR described in Table A or a variant or fragment thereof.

[1180] In an embodiment, the increase in half-life of the polynucleotide is measured according to an assay that measures the half-life of a polynucleotide, e.g., an assay described herein.

[1181] In an embodiment, the increase in level and/or activity, e.g., output, of the polypeptide encoded by the polynucleotide is measured according to an assay that measures the level and/or activity of a polypeptide, e.g., an assay described herein.

[1182] In an embodiment, the 5′ UTR comprises a sequence provided in Table A or a sequence with at least 80%, 85%, 90%, 95%, 96%, 97%, 98%, 99% or 100% identity to a 5′ UTR sequence provided in Table A, or a variant or a fragment thereof. In an embodiment, the 5′ UTR comprises a sequence with at least 80%, 85%, 90%, 95%, 96%, 97%, 98%, 99% or 100% identity to SEQ ID NO: 50, SEQ ID NO: 51, SEQ ID NO: 52, SEQ ID NO: 53, SEQ ID NO: 54, SEQ ID NO: 55, SEQ ID NO: 56, SEQ ID NO: 57, SEQ ID NO: 58, SEQ ID NO: 60, SEQ ID NO: 61, SEQ ID NO: 62, SEQ ID NO: 63, SEQ ID NO: 64, SEQ ID NO: 65, SEQ ID NO: 66, SEQ ID NO: 67, SEQ ID NO: 68, SEQ ID NO: 69, SEQ ID NO: 70, SEQ ID NO: 71, SEQ ID NO: 72, SEQ ID NO: 73, SEQ ID NO: 74, SEQ ID NO: 75, SEQ ID NO: 76, SEQ ID NO: 77, SEQ ID NO: 78, SEQ ID NO: 79, or SEQ ID NO: 80.

[1183] In an embodiment, the 5′ UTR comprises a sequence with at least 80%, 85%, 90%, 95%, 96%, 97%, 98%, 99%, or 100% identity to SEQ ID NO: 50. In an embodiment, the 5′ UTR comprises a sequence with at least 80%, 85%, 90%, 95%, 96%, 97%, 98%, 99%, or 100% identity to SEQ ID NO: 51. In an embodiment, the 5′ UTR comprises a sequence with at least 80%, 85%, 90%, 95%, 96%, 97%, 98%, 99%, or 100% identity to SEQ ID NO: 52. In an embodiment, the 5′ UTR comprises a sequence with at least 80%, 85%, 90%, 95%, 96%, 97%, 98%, 99%, or 100% identity to SEQ ID NO: 53. In an embodiment, the 5′ UTR comprises a sequence with at least 80%, 85%, 90%, 95%, 96%, 97%, 98%, 99%, or 100% identity to SEQ ID NO: 54. In an embodiment, the 5′ UTR comprises a sequence with at least 80%, 85%, 90%, 95%, 96%, 97%, 98%, 99%, or 100% identity to SEQ ID NO: 55. In an embodiment, the 5′ UTR comprises a sequence with at least 80%, 85%, 90%, 95%, 96%, 97%, 98%, 99%, or 100% identity to SEQ ID NO: 56. In an embodiment, the 5′ UTR comprises a sequence with at least 80%, 85%, 90%, 95%, 96%, 97%, 98%, 99%, or 100% identity to SEQ ID NO: 57. In an embodiment, the 5′ UTR comprises a sequence with at least 80%, 85%, 90%, 95%, 96%, 97%, 98%, 99%, or 100% identity to SEQ ID NO: 58. In an embodiment, the 5′ UTR comprises a sequence with at least 80%, 85%, 90%, 95%, 96%, 97%, 98%, 99%, or 100% identity to SEQ ID NO: 59. In an embodiment, the 5′ UTR comprises a sequence with at least 80%, 85%, 90%, 95%, 96%, 97%, 98%, 99%, or 100% identity to SEQ ID NO: 60. In an embodiment, the 5′ UTR comprises a sequence with at least 80%, 85%, 90%, 95%, 96%, 97%, 98%, 99%, or 100% identity to SEQ ID NO: 61. In an embodiment, the 5′ UTR comprises a sequence with at least 80%, 85%, 90%, 95%, 96%, 97%, 98%, 99%, or 100% identity to SEQ ID NO: 62. In an embodiment, the 5′ UTR comprises a sequence with at least 80%, 85%, 90%, 95%, 96%, 97%, 98%, 99%, or 100% identity to SEQ ID NO: 63. In an embodiment, the 5′ UTR comprises a sequence with at least 80%, 85%, 90%, 95%, 96%, 97%, 98%, 99%, or 100% identity to SEQ ID NO: 64. In an embodiment, the 5′ UTR comprises a sequence with at least 80%, 85%, 90%, 95%, 96%, 97%, 98%, 99%, or 100% identity to SEQ ID NO: 65. In an embodiment, the 5′ UTR comprises a sequence with at least 80%, 85%, 90%, 95%, 96%, 97%, 98%, 99%, or 100% identity to SEQ ID NO: 66. In an embodiment, the 5′ UTR comprises a sequence with at least 80%, 85%, 90%, 95%, 96%, 97%, 98%, 99%, or 100% identity to SEQ ID NO: 67. In an embodiment, the 5′ UTR comprises a sequence with at least 80%, 85%, 90%, 95%, 96%, 97%, 98%, 99%, or 100% identity to SEQ ID NO: 68. In an embodiment, the 5′ UTR comprises a sequence with at least 80%, 85%, 90%, 95%, 96%, 97%, 98%, 99%, or 100% identity to SEQ ID NO: 69. In an embodiment, the 5′ UTR comprises a sequence with at least 80%, 85%, 90%, 95%, 96%, 97%, 98%, 99%, or 100% identity to SEQ ID NO: 70. In an embodiment, the 5′ UTR comprises a sequence with at least 80%, 85%, 90%, 95%, 96%, 97%, 98%, 99%, or 100% identity to SEQ ID NO: 71. In an embodiment, the 5′ UTR comprises a sequence with at least 80%, 85%, 90%, 95%, 96%, 97%, 98%, 99%, or 100% identity to SEQ ID NO: 72. In an embodiment, the 5′ UTR comprises a sequence with at least 80%, 85%, 90%, 95%, 96%, 97%, 98%, 99%, or 100% identity to SEQ ID NO: 73. In an embodiment, the 5′ UTR comprises a sequence with at least 80%, 85%, 90%, 95%, 96%, 97%, 98%, 99%, or 100% identity to SEQ ID NO: 74. In an embodiment, the 5′ UTR comprises a sequence with at least 80%, 85%, 90%, 95%, 96%, 97%, 98%, 99%, or 100% identity to SEQ ID NO: 75. In an embodiment, the 5′ UTR comprises a sequence with at least 80%, 85%, 90%, 95%, 96%, 97%, 98%, 99%, or 100% identity to SEQ ID NO: 76. In an embodiment, the 5′ UTR comprises a sequence with at least 80%, 85%, 90%, 95%, 96%, 97%, 98%, 99%, or 100% identity to SEQ ID NO: 77. In an embodiment, the 5′ UTR comprises a sequence with at least 80%, 85%, 90%, 95%, 96%, 97%, 98%, 99%, or 100% identity to SEQ ID NO: 78. In an embodiment, the 5′ UTR comprises a sequence with at least 80%, 85%, 90%, 95%, 96%, 97%, 98%, 99%, or 100% identity to SEQ ID NO: 79. In an embodiment, the 5′ UTR comprises a sequence with at least 80%, 85%, 90%, 95%, 96%, 97%, 98%, 99%, or 100% identity to SEQ ID NO: 80.

[1184] In an embodiment, a 5′ UTR sequence provided in Table A has a first nucleotide which is an A. In an embodiment, a 5′ UTR sequence provided in Table A has a first nucleotide which is a G.

TABLE A
5′ UTR sequences

| SEQ ID | Sequence | |
|---|---|---|
| NO: | Name | Sequence |
| 50 | A1 | GGAAAUCGCAAAAUUUGCUCUUCGCGUUAGAUUUCUUU |
| | | UAGUUUUCUCGCAACUAGCAAGCUUUUUGUUCUCGCC |
| 51 | A5 | GGAAAUCCCCACAACCGCCUCAUAUCCAGGCUCAAGAAU |
| | | AGAGCUCAGUGUUUUGUUGUUUAAUCAUUCCGACGUGU |
| | | UUUGCGAUAUUCGCGCAAAGCAGCCAGUCGCGCGCUUGC |
| | | UUUUAAGUAGAGUUGUUUUUCCACCCGUUUGCCAGGCA |
| | | UCUUUAAUUUAACAUAUUUUUAUUUUUCAGGCUAACCU |
| | | ACGCCGCCACC |
| 52 | A6 | GGAAAUAAGAGAGAAAAGAAGAGUAAGAAGAAAUAUAA |
| | | GAUCUCCCUGAGCUUCAGGGAGCCCCGGCGCCGCCACC |
| 53 | A7 | GGAAACCCCCCACCCCCGUAAGAGAGAAAAGAAGAGUAA |
| | | GAAGAAAUAUAAGAUCUCCCUGAGCUUCAGGGAGCCCC |
| | | GGCGCCGCCACC |
| 54 | A8 | GGAGAACUUCCGCUUCCGUUGGCGCAAGCGCUUUCAUUU |
| | | UUUCUGCUACCGUGACUAAG |
| 55 | A9 | GGAAAUAAGAGAGAAAAGAAGAGUAAGAAGAAAUAUAA |
| | | GAGCCACC |
| 56 | A11 | GGAAAUAAGAGAGAAAAGAAGAGUAAGAAGAAAUAUAA |
| | (Reference) | GACCCCGGCGCCGCCACC |
| 57 | A2 | GGAAAUCGCAAAAUUUGCUCUUCGCGUUAGAUUUCUUU |
| | | UAGUUUUCUCGCAACUAGCAAGCUUUUUGUUCUCGCCGC |
| | | CGCC |
| 58 | A3 | GGAAAUCGCAAAAUUUUCUUUUCGCGUUAGAUUUCUUU |
| | | UAGUUUUCUUUCAACUAGCAAGCUUUUUGUUCUCGCCG |
| | | CCGCC |
| 59 | A4 | GGAAAUCGCAAAA(N₂)x(N₃)xCU(N₄)x(N₅)xCGCG |
| | | UUAGAUUUCUUUUAGUUUUCUN₆N₇CAACU |
| | | AGCAAGCUUUUUGUUCUCGCC(N₈CC)x |
| | | (N₂)x is a uracil and x is an integer from 0 to 5, e.g., wherein x = |
| | | 3 or 4; |
| | | (N₃)x is a guanine and x is an integer from 0 to 1; |
| | | (N₄)x is a cytosine and x is an integer from 0 to 1; |
| | | (N₅)x is a uracil and x is an integer from 0 to 5, e.g., wherein x = |
| | | 2 or 3; |
| | | N₆ is a uracil or cytosine; |
| | | N₇ is a uracil or guanine; |
| | | N₈ is adenine or guanine and x is an integer from 0 to 1. |
| 60 | A27 | GGAAAAUUUUAGCCUGGAACGUUAGAUAACUGUCCUGU |
| | | UGUCUUUAUAUACUUGGUCCCCAAGUAGUUUGUCUUCC |
| | | AAA |
| 61 | A12 | GGAAACUUUAUUUAGUGUUACUUUAUUUUCUGUUUAUU |
| | | UGUGUUUCUUCAGUGGGUUUGUUCUAAUUUCCUUGGCC |
| | | GCC |
| 62 | A13 | GGAAAAUCUGUAUUAGGUUGGCGUGUUCUUUGGUCGGU |
| | | UGUUAGUAUUGUUGUUGAUUCGUUUGUGGUCGGUUGCC |
| | | GCC |
| 63 | A14 | GGAAAAUUAUUAACAUCUUGGUAUUCUCGAUAACCAUU |
| | | CGUUGGAUUUUAUUGUAUUCGUAGUUUGGGUUCCUGCC |
| | | GCC |
| 64 | A15 | GGAAAUUAUUAUUAUUUCUAGCUACAAUUUAUCAUUGU |
| | | AUUAUUUUAGCUAUUCAUCAUUAUUUACUUGGUGAUCA |
| | | ACA |
| 65 | A16 | GGAAAUAGGUUGUUAACCAAGUUCAAGCCUAAUAAGCU |
| | | UGGAUUCUGGUGACUUGCUUCACCGUUGGCGGGCACCG |
| | | AUC |
| 66 | A17 | GGAAAUCGUAGAGAGUCGUACUUAGUACAUAUCGACUA |
| | | UCGGUGGACACCAUCAAGAUUAUAAACCAGGCCAGA |
| 67 | A18 | GGAAACCCGCCCAAGCGACCCCAACAUAUCAGCAGUUGC |
| | | CCAAUCCCAACUCCCAACACAAUCCCCAAGCAACGCCGC |
| | | C |
| 68 | A19 | GGAAAGCGAUUGAAGGCGUCUUUUCAACUACUCGAUUA |
| | | AGGUUGGGUAUCGUCGUGGGACUUGGAAAUUUGUUGUU |
| | | UCC |
| 69 | A20 | GGAAACUAAUCGAAAUAAAAGAGCCCCGUACUCUUUUA |
| | | UUUCUAUUAGGUUAGGAGCCUUAGCAUUUGUAUCUUAG |
| | | GUA |
| 70 | A21 | GGAAAUGUGAUUUCCAGCAACUUCUUUUGAAUAUAUUG |
| | | AAUUCCUAAUUCAAAGCGAACAAAUCUACAAGCCAUAU |
| | | ACC |
| 71 | A22 | GGAAAUCGUAGAGAGUCGUACUUACGUGGUCGCCAUUG |
| | | CAUAGCGCGCGAAAGCAACAGGAACAAGAACGCGCC |
| 72 | A23 | GGAAAUCGUAGAGAGUCGUACUUAGAAUAAACAGAGUC |
| | | GGGUCGACUUGUCUCUGAUACUACGACGUCACAAUC |
| 73 | A24 | GGAAAAUUUGCCUUCGGAGUUGCGUAUCCUGAACUGCC |
| | | CAGCCUCCUGAUAUACAACUGUUCCGCUUAUUCGGGCCG |
| | | CC |
| 74 | A25 | GGAAAUCUGAGCAGGAAUCCUUUGUGCAUUGAAGACUU |
| | | UAGAUUCCUCUCUGCGGUAGACGUGCACUUAUAAGUAU |
| | | UUG |
| 75 | A26 | GGAAAGCGAUUGAAGGCGUCUUUUCAACUACUCGAUUA |
| | | AGGUUGGGUAUCGUCGUGGGACUUGGAAAUUUGUUGCC |
| | | ACC |
| 76 | A28 | GGAAAUUUUUUUUUGAUAUUAUAAGAGUUUUUUUUUGA |
| | | UAUUAAGAAAAUUUUUUUUUGAUAUUAGAAGAGUAAGA |
| | | AGAAAUAUAAGACCCCGGCGCCGCCACC |
| 77 | A29 | GGAAAUAAGAGAGAAAAGAAGAGUAAGAAGAAAUAUAA |
| | | GAGCCAAAAAAAAAAAACC |
| 78 | A30 | GGAAAUCUCCCUGAGCUUCAGGGAGUAAGAGAGAAAAG |
| | | AAGAGUAAGAAGAAAUAUAAGACCCCGGCGCCGCCACC |
| 79 | A31 | GCCRCC, wherein R = A or G |
| 80 | A32 | GGAAAUCGCAAAAUUUGCUCUUCGCGUUAGAUUUCUUU |
| | | UAGUUUUCUCGCAACUAGCAAGCUUUUUGUUCUCGCC |

[1185] In an embodiment, the 5′ UTR comprises a variant of SEQ ID NO: 50. In an embodiment, the variant of SEQ ID NO: 50 comprises a nucleic acid sequence of Formula A:

(SEQ ID NO: 59)
GGAAAUCGCAAAA(N2)X(N3)X CU(N4)X(N5)XCGCGUUAGAUUU
CUUUUAGUUUUCUN6N7CAACUAGCAAGCUUUUUGUUCUCGC
C(N8CC)x,

wherein:
[1186] (N2)x is a uracil and x is an integer from 0 to 5, e.g., wherein x=3 or 4;
[1187] (N3)x is a guanine and x is an integer from 0 to 1;
[1188] (N4)x is a cytosine and x is an integer from 0 to 1;
[1189] (N5)x is a uracil and x is an integer from 0 to 5, e.g., wherein x=2 or 3;
[1190] N6 is a uracil or cytosine;
[1191] N7 is a uracil or guanine;
[1192] N8 is adenine or guanine and x is an integer from 0 to 1.

[1193] In an embodiment (N2)x is a uracil and x is 0. In an embodiment (N2)x is a uracil and x is 1. In an embodiment (N2)x is a uracil and x is 2. In an embodiment (N2)x is a uracil and x is 3. In an embodiment, (N2)x is a uracil and x is 4. In an embodiment (N2)x is a uracil and x is 5.

[1194] In an embodiment, (N3)x is a guanine and x is 0. In an embodiment, (N3)x is a guanine and x is 1.

[1195] In an embodiment, (N4)x is a cytosine and x is 0. In an embodiment, (N4)x is a cytosine and x is 1.

[1196] In an embodiment (N5)x is a uracil and x is 0. In an embodiment (N5)x is a uracil and x is 1. In an embodiment (N5)x is a uracil and x is 2. In an embodiment (N5)x is a uracil and x is 3. In an embodiment, (N5)x is a uracil and x is 4. In an embodiment (N5)x is a uracil and x is 5.

[1197] In an embodiment, N6 is a uracil. In an embodiment, N6 is a cytosine.

[1198] In an embodiment, N7 is a uracil. In an embodiment, N7 is a guanine.

[1199] In an embodiment, N8 is an adenine and x is 0. In an embodiment, N8 is an adenine and x is 1.

[1200] In an embodiment, N8 is a guanine and x is 0. In an embodiment, N8 is a guanine and x is 1.

[1201] In an embodiment, the 5′ UTR comprises a variant of SEQ ID NO: 50. In an embodiment, the variant of SEQ ID NO: 50 comprises a sequence with at least 50%, 60%, 70%, 80%, 85%, 90%, 95%, 96%, 97%, 98%, or 99% identity to SEQ ID NO: 50. In an embodiment, the variant of SEQ ID NO: 50 comprises a sequence with at least 50% identity to SEQ ID NO: 50. In an embodiment, the variant of SEQ ID NO: 50 comprises a sequence with at least 60% identity to SEQ ID NO: 50. In an embodiment, the variant of SEQ ID NO: 50 comprises a sequence with at least 70% identity to SEQ ID NO: 50. In an embodiment, the variant of SEQ ID NO: 50 comprises a sequence with at least 80% identity to SEQ ID NO: 50. In an embodiment, the variant of SEQ ID NO: 50 comprises a sequence with at least 90% identity to SEQ ID NO: 50. In an embodiment, the variant of SEQ ID NO: 50 comprises a sequence with at least 95% identity to SEQ ID NO: 50. In an embodiment, the variant of SEQ ID NO: 50 comprises a sequence with at least 96% identity to SEQ ID NO: 50. In an embodiment, the variant of SEQ ID NO: 50 comprises a sequence with at least 97% identity to SEQ ID NO: 50. In an embodiment, the variant of SEQ ID NO: 50 comprises a sequence with at least 98% identity to SEQ ID NO: 50. In an embodiment, the variant of SEQ ID NO: 50A comprises a sequence with at least 99% identity to SEQ ID NO: 50.

[1202] In an embodiment, the variant of SEQ ID NO: 50 comprises a uridine content of at least 5%, 10%, 20%, 30%, 40%, 50%, 60%, 70%, or 80%. In an embodiment, the variant of SEQ ID NO: 50 comprises a uridine content of at least 5%. In an embodiment, the variant of SEQ ID NO: 50 comprises a uridine content of at least 10%. In an embodiment, the variant of SEQ ID NO: 50 comprises a uridine content of at least 20%. In an embodiment, the variant of SEQ ID NO: 50 comprises a uridine content of at least 30%. In an embodiment, the variant of SEQ ID NO: 50 comprises a uridine content of at least 40%. In an embodiment, the variant of SEQ ID NO: 50 comprises a uridine content of at least 50%. In an embodiment, the variant of SEQ ID NO: 50 comprises a uridine content of at least 60%. In an embodiment, the variant of SEQ ID NO: 50 comprises a uridine content of at least 70%. In an embodiment, the variant of SEQ ID NO: 50 comprises a uridine content of at least 80%.

[1203] In an embodiment, the variant of SEQ ID NO: 50 comprises at least 2, 3, 4, 5, 6 or 7 consecutive uridines (e.g., a polyuridine tract). In an embodiment, the polyuridine tract in the variant of SEQ ID NO: 50 comprises at least 1-7, 2-7, 3-7, 4-7, 5-7, 6-7, 1-6, 1-5, 1-4, 1-3, 1-2, 2-6, or 3-5 consecutive uridines. In an embodiment, the polyuridine tract in the variant of SEQ ID NO: 50 comprises 4 consecutive uridines. In an embodiment, the polyuridine tract in the variant of SEQ ID NO: 50 comprises 5 consecutive uridines.

[1204] In an embodiment, the variant of SEQ ID NO: 50 comprises 1, 2, 3, 4, 5, 6, 7, 8, 9, 10, 11, 12, 13, 14, or 15 polyuridine tracts. In an embodiment, the variant of SEQ ID NO: 50 comprises 3 polyuridine tracts. In an embodiment, the variant of SEQ ID NO: 50 comprises 4 polyuridine tracts. In an embodiment, the variant of SEQ ID NO: 50 comprises 5 polyuridine tracts.

[1205] In an embodiment, one or more of the polyuridine tracts are adjacent to a different polyuridine tract. In an embodiment, each of, e.g., all, the polyuridine tracts are adjacent to each other, e.g., all of the polyuridine tracts are contiguous.

[1206] In an embodiment, one or more of the polyuridine tracts are separated by 1, 2, 3, 4, 5, 6, 7, 8, 9, 10, 11, 2, 13, 14, 15, 16, 17, 18, 19, 20, 30, 40, 50, or 60 nucleotides. In an embodiment, each of, e.g., all of, the polyuridine tracts are separated by 1, 2, 3, 4, 5, 6, 7, 8, 9, 10, 11, 2, 13, 14, 15, 16, 17, 18, 19, 20, 30, 40, 50, or 60 nucleotides.

[1207] In an embodiment, a first polyuridine tract and a second polyuridine tract are adjacent to each other.

[1208] In an embodiment, a subsequent, e.g., third, fourth, fifth, sixth or seventh, eighth, ninth, or tenth, polyuridine tract is separated by 1, 2, 3, 4, 5, 6, 7, 8, 9, 10, 11, 2, 13, 14, 15, 16, 17, 18, 19, 20, 30, 40, 50, or 60 nucleotides from the first polyuridine tract, the second polyuridine tract, or any one of the subsequent polyuridine tracts.

[1209] In an embodiment, a first polyuridine tract is separated by 1, 2, 3, 4, 5, 6, 7, 8, 9, 10, 11, 2, 13, 14, 15, 16, 17, 18, 19, 20, 30, 40, 50, or 60 nucleotides from a subsequent polyuridine tract, e.g., a second, third, fourth, fifth, sixth or seventh, eighth, ninth, or tenth polyuridine tract. In an embodiment, one or more of the subsequent polyuridine tracts are adjacent to a different polyuridine tract.

[1210] In an embodiment, the 5′ UTR comprises a Kozak sequence, e.g., a GCCRCC nucleotide sequence (SEQ ID NO: 79) wherein R is an adenine or guanine. In an embodiment, the Kozak sequence is disposed at the 3′ end of the 5‘ ’UTR sequence.

[1211] In an aspect, the polynucleotide (e.g., mRNA) comprising an open reading frame encoding an ITB6 polypeptide (e.g., any one of SEQ ID NOs: 18, 2-6, 8, 10, 12, 14, 16, or 160-175) and comprising a 5′ UTR sequence disclosed herein is formulated as an LNP. In an embodiment, the LNP composition comprises: (i) an ionizable lipid, e.g., an amino lipid; (ii) a sterol or other structural lipid; (iii) a non-cationic helper lipid or phospholipid; and (iv) a PEG-lipid.

[1212] In another aspect, the LNP compositions of the disclosure are used in a method of treating a disease or disorder, or in a method of inhibiting an immune response in a subject.

[1213] In an aspect, an LNP composition comprising a polynucleotide disclosed herein encoding a n ITB6 polypeptide, e.g., as described herein, can be administered with an additional agent, e.g., as described herein.

### b. 3′ UTR Sequences

[1214] 3′UTR sequences have been shown to influence translation, half-life, and subcellular localization of mRNAs (Mayr C., Cold Spring Harb Persp Biol 2019 Oct. 1; 11(10):a034728).

[1215] Disclosed herein, inter alia, is a polynucleotide, e.g., mRNA, comprising an open reading frame encoding an ITB6 polypeptide (e.g., any one of SEQ ID NOs: 18, 2-6, 8, 10, 12, 14, 16, or 160-175) encoding a polypeptide, which polynucleotide has a 3′ UTR that confers an increased half-life, increased expression and/or increased activity of the polypeptide encoded by said polynucleotide, or of the polynucleotide itself. In an embodiment, a polynucleotide disclosed herein comprises: (a) a 5′-UTR (e.g., as described herein); (b) a coding region comprising a stop element (e.g., as described herein); and (c) a 3′-UTR (e.g., as provided in Table B or a variant or fragment thereof), and LNP compositions comprising the same. In an embodiment, the polynucleotide comprises a 3′-UTR comprising a sequence provided in Table B or a variant or fragment thereof.

[1216] In an embodiment, the polynucleotide having a 3′ UTR sequence provided in Table B or a variant or fragment thereof, results in an increased half-life of the polynucleotide, e.g., about 1.5-10-fold increase in half-life of the polynucleotide. In an embodiment, the increase in half-life is about 1.5, 2, 3, 4, 5, 6, 7, 8, 9, or 10-fold, or more. In an embodiment, the increase in half-life is about 1.5-fold or more. In an embodiment, the increase in half-life is about 2-fold or more. In an embodiment, the increase in half-life is about 3-fold or more. In an embodiment, the increase in half-life is about 4-fold or more. In an embodiment, the increase in half-life is about 5-fold or more. In an embodiment, the increase in half-life is about 6-fold or more. In an embodiment, the increase in half-life is about 7-fold or more. In an embodiment, the increase in half-life is about 8-fold. In an embodiment, the increase in half-life is about 9-fold or more. In an embodiment, the increase in half-life is about 10-fold or more.

[1217] In an embodiment, the polynucleotide having a 3′ UTR sequence provided in Table B or a variant or fragment thereof, results in a polynucleotide with a mean half-life score of greater than 10.

[1218] In an embodiment, the polynucleotide having a 3′ UTR sequence provided in Table B or a variant or fragment thereof, results in an increased level and/or activity, e.g., output, of the polypeptide encoded by the polynucleotide.

[1219] In an embodiment, the increase is compared to an otherwise similar polynucleotide which does not have a 3′ UTR, has a different 3′ UTR, or does not have a 3′ UTR of Table B or a variant or fragment thereof.

[1220] In an embodiment, the polynucleotide comprises a 3′ UTR sequence provided in Table B or a sequence with at least 80%, 85%, 90%, 95%, 96%, 97%, 98%, 99% or 100% identity to a 3′ UTR sequence provided in Table B, or a fragment thereof. In an embodiment, the 3′ UTR comprises a sequence with at least 80%, 85%, 90%, 95%, 96%, 97%, 98%, 99% or 100% identity to SEQ ID NO: 100, SEQ ID NO: 101, SEQ ID NO: 102, SEQ ID NO: 103, SEQ ID NO: 104, SEQ ID NO: 105, SEQ ID NO: 106, SEQ ID NO: 107, SEQ ID NO: 108, SEQ ID NO: 109, SEQ ID NO: 110, SEQ ID NO: 111, SEQ ID NO: 112, SEQ ID NO: 113, SEQ ID NO: 114, SEQ ID NO:115, SEQ ID NO:136, SEQ ID NO: 137, SEQ ID NO: 138, SEQ ID NO: 139, SEQ ID NO: 140, or SEQ ID NO: 141.

[1221] In an embodiment, the 3′ UTR comprises the sequence of SEQ ID NO: 100, or a sequence with at least 80%, 85%, 90%, 95%, 96%, 97%, 98%, 99% or 100% identity to SEQ ID NO: 100. In an embodiment, the 3′ UTR comprises the sequence of SEQ ID NO: 101, or a sequence with at least 80%, 85%, 90%, 95%, 96%, 97%, 98%, 99% or 100% identity to SEQ ID NO: 101. In an embodiment, the 3′ UTR comprises the sequence of SEQ ID NO: 102, or a sequence with at least 80%, 85%, 90%, 95%, 96%, 97%, 98%, 99% or 100% identity to SEQ ID NO: 102. In an embodiment, the 3′ UTR comprises the sequence of SEQ ID NO: 103, or a sequence with at least 80%, 85%, 90%, 95%, 96%, 97%, 98%, 99% or 100% identity to SEQ ID NO: 103. In an embodiment, the 3′ UTR comprises the sequence of SEQ ID NO: 104, or a sequence with at least 80%, 85%, 90%, 95%, 96%, 97%, 98%, 99% or 100% identity to SEQ ID NO: 104. In an embodiment, the 3′ UTR comprises the sequence of SEQ ID NO: 105, or a sequence with at least 80%, 85%, 90%, 95%, 96%, 97%, 98%, 99% or 100% identity to SEQ ID NO: 105. In an embodiment, the 3′ UTR comprises the sequence of SEQ ID NO: 106, or a sequence with at least 80%, 85%, 90%, 95%, 96%, 97%, 98%, 99% or 100% identity to SEQ ID NO: 106. In an embodiment, the 3′ UTR comprises the sequence of SEQ ID NO: 107, or a sequence with at least 80%, 85%, 90%, 95%, 96%, 97%, 98%, 99% or 100% identity to SEQ ID NO: 107. In an embodiment, the 3′ UTR comprises the sequence of SEQ ID NO: 108, or a sequence with at least 80%, 85%, 90%, 95%, 96%, 97%, 98%, 99% or 100% identity to SEQ ID NO: 108. In an embodiment, the 3′ UTR comprises the sequence of SEQ ID NO: 109, or a sequence with at least 80%, 85%, 90%, 95%, 96%, 97%, 98%, 99% or 100% identity to SEQ ID NO: 109. In an embodiment, the 3′ UTR comprises the sequence of SEQ ID NO: 110, or a sequence with at least 80%, 85%, 90%, 95%, 96%, 97%, 98%, 99% or 100% identity to SEQ ID NO: 110. In an embodiment, the 3′ UTR comprises the sequence of SEQ ID NO: 111, or a sequence with at least 80%, 85%, 90%, 95%, 96%, 97%, 98%, 99% or 100% identity to SEQ ID NO: 111. In an embodiment, the 3′ UTR comprises the sequence of SEQ ID NO: 112, or a sequence with at least 80%, 85%, 90%, 95%, 96%, 97%, 98%, 99% or 100% identity to SEQ ID NO: 112. In an embodiment, the 3′ UTR comprises the sequence of SEQ ID NO: 113, or a sequence with at least 80%, 85%, 90%, 95%, 96%, 97%, 98%, 99% or 100% identity to SEQ ID NO: 113. In an embodiment, the 3′ UTR comprises the sequence of SEQ ID NO: 114, or a sequence with at least 80%, 85%, 90%, 95%, 96%, 97%, 98%, 99% or 100% identity to SEQ ID NO: 114. In an embodiment, the 3′ UTR comprises the sequence of SEQ ID NO: 115, or a sequence with at least 80%, 85%, 90%, 95%, 96%, 97%, 98%, 99% or 100% identity to SEQ ID NO: 115. In an embodiment, the 3′ UTR comprises the sequence of SEQ ID NO: 136, or a sequence with at least 80%, 85%, 90%, 95%, 96%, 97%, 98%, 99% or 100% identity to SEQ ID NO: 136. In an embodiment, the 3′ UTR comprises the sequence of SEQ ID NO: 137, or a sequence with at least 80%, 85%, 90%, 95%, 96%, 97%, 98%, 99% or 100% identity to SEQ ID NO: 137. In an embodiment, the 3′ UTR comprises the sequence of SEQ ID NO: 138, or a sequence with at least 80%, 85%, 90%, 95%, 96%, 97%, 98%, 99% or 100% identity to SEQ ID NO: 138. In an embodiment, the 3′ UTR comprises the sequence of SEQ ID NO: 139, or a sequence with at least 80%, 85%, 90%, 95%, 96%, 97%, 98%, 99% or 100% identity to SEQ ID NO: 139. In an embodiment, the 3′ UTR comprises the sequence of SEQ ID NO: 140, or a sequence with at least 80%, 85%, 90%, 95%, 96%, 97%, 98%, 99% or 100% identity to SEQ ID NO: 140. In an embodiment, the 3′ UTR comprises the sequence of SEQ ID NO: 141, or a sequence with at least 80%, 85%, 90%, 95%, 96%, 97%, 98%, 99% or 100% identity to SEQ ID NO: 141.

TABLE B
3′ UTR sequences

| SEQ ID | Sequence | |
|---|---|---|
| NO | Name | Sequence |
| 100 | B1 | UAAUAGUAAGCUGGAGCCUCCUGAGAGACCUGUGUG |
| | | AACUAUUGAGAAGAUCGGAACAGCUCCUUACUCUGA |
| | | GGAAGUUGGUACCCCCGUGGUCUUUGAAUAAAGUCU |
| | | GAGUGGGCGGC |
| 101 | B3 | UAAUAGUAAGCUGGAGCCUCACUCUCCUCUCCAUCCC |
| | | GUAUCCAGGCUGUGAAUUUUUCAAGGAAUAUAAAGA |
| | | UCGGGAUGUACCCCCGUGGUCUUUGAAUAAAGUCUG |
| | | AGUGGGCGGC |
| 102 | B4 | UGAUAGUAAGCUGGAGCCUCUAGUGACGGCAACAGG |
| | | GCUUGGUUUUUCCUUGUUGUGAAAUCGACAUCUCUG |
| | | AAGACAGGGUACCCCCGUGGUCUUUGAAUAAAGUCU |
| | | GAGUGGGCGGC |
| 103 | B5 | UGAUAGUAAGCUGGAGCCUCCUUCCAUCUAGUCACA |
| | | AAGACUCCUUCGUCCCCAGUUGCCGUCUAGGAUUGG |
| | | GCCUCCCAGUACCCCCGUGGUCUUUGAAUAAAGUCUG |
| | | AGUGGGCGGC |
| 104 | B6 | UGAUAGUAAGCUGGAGCCUCCCAUAACAUGACAUAU |
| | | CUGGAUUUUGUGCUUAGAACCUUAAAUUGGAAGCAU |
| | | UCUUAAUUGUACCCCCGUGGUCUUUGAAUAAAGUCU |
| | | GAGUGGGCGGC |
| 105 | B7 | UAAUAGUAAGCUGGAGCCUCCGGAAAACUAAAAUAG |
| | | AGAUAUUUCAAGAUUUUAUAAUUUUCAAAGACCUUU |
| | | GAAAUAUUGUACCCCCGUGGUCUUUGAAUAAAGUCU |
| | | GAGUGGGCGGC |
| 106 | B8 | UAAUAGUAAGCUGGAGCCUCUACACAUUGCUUCUAG |
| | | UUGGCAGAAAUAAUUGAUUAAAAGACCAGAAACUGU |
| | | GAUAACUGGUACCCCCGUGGUCUUUAAAUAAAGUCU |
| | | AAGUGGGCGGC |
| 107 | B9 | UGAUAAUAGGCUGGAGCCUCGGUGGCCAUGCUUCUU |
| | | GCCCCUUGGGCCUCCCCCCAGCCCCUCCUCCCCUUCC |
| | | UGCACCCGUACCCCCGUGGUCUUUGAAUAAAGUCUG |
| | | AGUGGGCGGC |
| 108 | B10 | UGAUAAUAGGCUGGAGCCUCGGUGGCCUAGCUUCUU |
| | | GCCCCUUGGGCCUCCCCCCAGCCCCUCCUCCCCUUCC |
| | | UGCACCCGUACCCCCGUGGUCUUUGAAUAAAGUCUG |
| | | AGUGGGCGGC |
| 109 | B11 | UGAUAAUAGGCUGGAGCCUCGGUGGCCAUGCUUCUU |
| | | GCCCCUUGGGCCUCCCCCCAGCCCCUCCUCCCCUUCC |
| | | UGCACCCGUACCCCCCAAACACCAUUGUCACACUCCA |
| | | GUGGUCUUUGAAUAAAGUCUGAGUGGGCGGC |
| 110 | B12 | UGAUAAUAGGCUGGAGCCUCGGUGGCCUAGCUUCUU |
| | | GCCCCUUGGGCCUCCCCCCAGCCCCUCCUCCCCUUCC |
| | | UGCACCCGUACCCCCCAAACACCAUUGUCACACUCCA |
| | | GUGGUCUUUGAAUAAAGUCUGAGUGGGCGGC |
| 111 | B13 | UGAUAAUAGGCUGGAGCCUCGGUGGCCUAGCUUCUU |
| | | GCCCCUUGGGCCUCCCCCCAGCCCCUCCUCCCCUUCC |
| | | UGCACCCGUACCCCCUCCAUAAAGUAGGAAACACUAC |
| | | AGUGGUCUUUGAAUAAAGUCUGAGUGGGCGGC |
| 112 | B14 | UGAUAAUAGGCUGGAGCCUCGGUGGCCUAGCUUCUU |
| | | GCCCCUUGGGCCUCCCCCCAGCCCCUCCUCCCCUUCC |
| | | UGCACCCGUACCCCCCGCAUUAUUACUCACGGUACGA |
| | | GUGGUCUUUGAAUAAAGUCUGAGUGGGCGGC |
| 113 | B15 | UGAUAAUAGUCCAUAAAGUAGGAAACACUACAGCUG |
| | | GAGCCUCGGUGGCCAUGCUUCUUGCCCCUUGGGCCUC |
| | | CCCCCAGCCCCUCCUCCCCUUCCUGCACCCGUACCCCC |
| | | CGCAUUAUUACUCACGGUACGAGUGGUCUUUGAAUA |
| | | AAGUCUGAGUGGGGGC |
| 114 | B16 | UGAUAAUAGUCCAUAAAGUAGGAAACACUACAGCUG |
| | | GAGCCUCGGUGGCCUAGCUUCUUGCCCCUUGGGCCUC |
| | | CAUAAAGUAGGAAACACUACAUCCCCCCAGCCCCUCC |
| | | UCCCCUUCCUGCACCCGUACCCCCUCCAUAAAGUAGG |
| | | AAACACUACAGUGGUCUUUGAAUAAAGUCUGAGUGG |
| | | GCGGC |
| 115 | B2 | CUGAGAGACCUGUGUGAACUAUUGAGAAGAUCGGAA |
| | | CAGCUCCUUACUCUGAGGAAGUUG |
| 116 | B17 | UGAUAAUAGGCUGGAGCCUCUCACACACCUCUGCCCC |
| | | UUGGGCCUCCCACUCCCAUGGCUCUGGGCGGUCCAGA |
| | | AGGAGCGUACCCCCGUGGUCUUUGAAUAAAGUCUGA |
| | | GUGGGCGGC |
| 117 | B18 | UGAUAAUAGGCUGGAGCCUCCACCGCGUUAUCCGUU |
| | | CCUCGUAGGCUGGUCCUGGGGAACGGGUCGGGGGGU |
| | | ACCCCCGUGGUCUUUGAAUAAAGUCUGAGUGGGGG |
| | | C |
| 118 | B19 | UGAUAAUAGGCUGGAGCCUCUGCCCGGCAACGGCCA |
| | | GGUCUGUGCCAAGUGUUUGCUGACGCAACCCCCACUG |
| | | GCUGGGGCUUGGUCAUGGGCCAUCAGCGCGUGCGUG |
| | | GAACCUUUUCGGCUCCUCUGCCGAUCCAUACUGCGGA |
| | | ACUCCUAGCCGCUUGUUUUGCUCGCAGCAGGUCUGG |
| | | AGCAAACAUUAUCGGGACUGAUAACUCUGUUGUCCU |
| | | GUACCCCCGUGGUCUUUGAAUAAAGUCUGAGUGGGC |
| | | GGC |
| 119 | B20 | UGAUAAUAGGCUGGAGCCUCGGUGGCCUAGCUUCUU |
| | | GCCCCUUGGGCCUCCCCCCAGCCCCUCCUCCCCUUCC |
| | | UGCACCCGUACCCUUUUUUUUUUUUUUUUUUUCUUC |
| | | UUUUCUUUUUUUUCUUUUUUUUUUUUCUUUCUUUUU |
| | | UUCUUUUUUUUUCUUUUUUUUUUCUUUUUUUUUUU |
| | | UUUUUCCGUGGUCUUUGAAUAAAGUCUGAGUGGGCG |
| | | GC |
| 120 | B21 | UGAUAAUAGGCUGGAGCCUCGGUGGCCUAGCUUCUU |
| | | GCCCCUUGGGCCUCCCCCCAGCCCCUCCUCCCCUUCC |
| | | UGCACCCGUACCCUUUUUUUUUUUUUUUUUUUUUUU |
| | | UUUUUUUUUUUUUUUUUUUUUUUUUUUUUUUUUUUU |
| | | UUUUUUUUUUUUUUUUUUUUUUUUUUUUUUUUUUUU |
| | | UUUUUCCGUGGUCUUUGAAUAAAGUCUGAGUGGGCG |
| | | GC |
| 133 | B22 | UAAGUCUCCAUAAAGUAGGAAACACUACAGCUGGAG |
| | | CCUCGGUGGCCUAGCUUCUUGCCCCUUGGGCCUCCAU |
| | | AAAGUAGGAAACACUACAUCCCCCCAGCCCCUCCUCC |
| | | CCUUCCUGCACCCGUACCCCCUCCAUAAAGUAGGAAA |
| | | CACUACAGUGGUCUUUGAAUAAAGUCUGAGUGGGCG |
| | | GC |
| 134 | B23 | UAAAGCGCUGGAGCCUCGGUGGCCUAGCUUCUUGCCC |
| | | CUUGGGCCUCCCCCCAGCCCCUCCUCCCCUUCCUGCA |
| | | CCCGUACCCCCUCCAUAAAGUAGGAAACACUACAGUG |
| | | GUCUUUGAAUAAAGUCUGAGUGGGCGGC |
| 135 | B24 | UAAAGCUCCCCGGGGUCCAUAAAGUAGGAAACACUA |
| | | CAGCUGGAGCCUCCUGAGAGACCUGUGUGAACUAUU |
| | | GAGAAGAUCGGAACAGCUCCUUACUCUGAGGAAGUU |
| | | GUCCAUAAAGUAGGAAACACUACAGUACCCCCUCCAU |
| | | AAAGUAGGAAACACUACAGUGGUCUUUGAAUAAAGU |
| | | CUGAGUGGGCGGC |
| 136 | B25 | UAAUAGUAAACCUCACUCACGGCCACAUUGAGUGCC |
| | | AGGCUCCGGGCUGGUUUAUAGUAGUGUAGAGCAUUG |
| | | CAGCACUUAGACUGGGGUGCUGUAGUCUUUAUUGUA |
| | | GUCUUUCCACAUACCUGAUAAUUCUUAGAUAAUUUC |
| | | UUAUUUUAAUUCCAUAAAGUAGGAAACACUACAUAA |
| | | AUCUCCAUAAAGUAGGAAACACUACAUAUUCUUCCA |
| | | UAAAGUAGGAAACACUACAUAGGCU |
| 137 | B26 | GCCUCCACCGCGUUAUCCGUUCCUCGUAGGCUGGUCC |
| | | UGGGGAACGGGUCGGCGGGUACCCCCGUGGUCUUUG |
| | | AAUAAAGUCUGAGUGGGCGGC |
| 138 | B27 | CACCGCGUUAUCCGUUCCUCGUAGGCUGGUCCUGGGG |
| | | AACGGGUCGGCGGGCCUCGGUGGCCUAGCUUCUUGCC |
| | | CCUUGGGCCCACCGCGUUAUCCGUUCCUCGUAGGCUG |
| | | GUCCUGGGGAACGGGUCGGCGGUCCCCCCAGCCCCUC |
| | | CUCCCCUUCCUGCACCCGUACCCCCCACCGCGUUAUC |
| | | CGUUCCUCGUAGGCUGGUCCUGGGGAACGGGUCGGC |
| | | GGGUGGUCUUUGAAUAAAGUCUGAGUGGGCGGC |
| 139 | B28 | UAAAGCUCCCCGGGGGCCUCGGUGGCCUAGCUUCUUG |
| | | CCCCUUGGGCCUCCCCCCAGCCCCUCCUCCCCUUCCU |
| | | GCACCCGUACCCCCGUGGUCUUUGAAUAAAGUCUGA |
| | | GUGGGCGGC |
| 140 | B29 | UAAGUCUCCGCUGGAGCCUCGGUGGCCUAGCUUCUUGCCCCUUGGGC |
| | | CUCCCCCCAGCCCCUCCUCCCCUUCCUGCACCCGUACCCCCGUGGUCUU |
| | | UGAAUAAAGUCUGAGUGGGCGGC |
| 141 | B30 | UAAGCCCCUCCGGGGGCCUCGGUGGCCUAGCUUCUUGCCCCUUGGGCC |
| | | UCCCCCCAGCCCCUCCUCCCCUUCCUGCACCCGUACCCCCGUGGUCUUU |
| | | GAAUAAAGUCUGAGUGGGCGGC |
| 142 | B31 | UAAGCCCCUCCGGGGCAAACACCAUUGUCACACUCCAGCCUCGGUGG |
| | | CCUAGCUUCUUGCCCCUUGGGCCCAAACACCAUUGUCACACUCCAUC |
| | | CCCCCAGCCCCUCCUCCCCUUCCUGCACCCGUACCCCCCAAACACCA |
| | | UUGUCACACUCCAGUGGUCUUUGAAUAAAGUCUGAGUGGGCGGC |
| 143 | B32 | UAAGCCCCUCCGGGGGCCUCGGUGGCCUAGCUUCUUGCCCCUUGGGC |
| | | CUCCCCCCAGCCCCUCCUCCCCUUCCUGCACCCGUACCCCCCAAACA |
| | | CCAUUGUCACACUCCAGUGGUCUUUGAAUAAAGUCUGAGUGGGCGGC |
| 144 | B33 | UAAGCCCCUCCGGGGGCCUCCUGAGAGACCUGUGUGAACUAUUGAGA |
| | | AGAUCGGAACAGCUCCUUACUCUGAGGAAGUUGGUACCCCCCAAACA |
| | | CCAUUGUCACACUCCAGUGGUCUUUGAAUAAAGUCUGAGUGGGCGGC |
| 145 | B34 | UAAAGCUCCCCGGGGGCCUCGGUGGCCUAGCUUCUUGCCCCUUGGGC |
| | | CUCCCCCCAGCCCCUCCUCCCCUUCCUGCACCCGUACCCCCCAAACA |
| | | CCAUUGUCACACUCCAGUGGUCUUUGAAUAAAGUCUGAGUGGGCGGC |

[1222] In an embodiment, the 3′ UTR comprises a micro RNA (miRNA) binding site, e.g., as described herein, which binds to a miR present in a human cell. In an embodiment, the 3′ UTR comprises a miRNA binding site of SEQ ID NO: 212, SEQ ID NO: 174, SEQ ID NO: 152 or a combination thereof. In an embodiment, the 3′ UTR comprises a plurality of miRNA binding sites, e.g., 2, 3, 4, 5, 6, 7 or 8 miRNA binding sites. In an embodiment, the plurality of miRNA binding sites comprises the same or different miRNA binding sites.

miR122 bs =
(SEQ ID NO: 212)
CAAACACCAUUGUCACACUCCA
miR-142-3p bs =
(SEQ ID NO: 174)
UCCAUAAAGUAGGAAACACUACA
miR-126 bs =
(SEQ ID NO: 152)
CGCAUUAUUACUCACGGUACGA

[1223] In an aspect, disclosed herein is a polynucleotide encoding a polypeptide, wherein the polynucleotide comprises: (a) a 5′-UTR, e.g., as described herein; (b) a coding region comprising a stop element (e.g., as described herein); and (c) a 3′-UTR (e.g., as described herein).

[1224] In an aspect, an LNP composition comprising a polynucleotide comprising an open reading frame encoding an ITB6 polypeptide (e.g., any one of SEQ ID NOs: 18, 2-6, 8, 10, 12, 14, 16, or 160-175) and comprising a 3′ UTR disclosed herein comprises: (i) an ionizable lipid, e.g., an amino lipid; (ii) a sterol or other structural lipid; (iii) a non-cationic helper lipid or phospholipid; and (iv) a PEG-lipid.

[1225] In another aspect, the LNP compositions of the disclosure are used in a method of treating a disease or disorder, or in a method of inhibiting an immune response in a subject.

[1226] In an aspect, an LNP composition comprising a polynucleotide disclosed herein encoding an ITB6 polypeptide therapeutic payload or prophylactic payload, e.g., as described herein, can be administered with an additional agent, e.g., as described herein.

### Regions Having a 5′ Cap

[1227] The disclosure also includes a polynucleotide that comprises both a 5′ Cap and a polynucleotide of the present invention (e.g., a polynucleotide comprising a nucleotide sequence encoding an immune checkpoint inhibitor polypeptide).

[1228] The 5′ cap structure of a natural mRNA is involved in nuclear export, increasing mRNA stability and binds the mRNA Cap Binding Protein (CBP), which is responsible for mRNA stability in the cell and translation competency through the association of CBP with poly(A) binding protein to form the mature cyclic mRNA species. The cap further assists the removal of 5′ proximal introns during mRNA splicing.

[1229] Endogenous mRNA molecules can be 5′-end capped generating a 5′-ppp 5′ (5′-5′-triphosphate) linkage between a terminal guanosine cap residue and the 5′-terminal transcribed sense nucleotide of the mRNA molecule. This 5′-guanylate cap can then be methylated to generate an N7-methyl-guanylate residue. The ribose sugars of the terminal and/or ante-terminal transcribed nucleotides of the 5′ end of the mRNA can optionally also be 2′-O-methylated. 5′-decapping through hydrolysis and cleavage of the guanylate cap structure can target a nucleic acid molecule, such as an mRNA molecule, for degradation.

[1230] In some embodiments, the polynucleotides of the present invention (e.g., a polynucleotide comprising a nucleotide sequence encoding an ITB6 polypeptide) incorporate a cap moiety.

[1231] In some embodiments, polynucleotides of the present invention (e.g., a polynucleotide comprising a nucleotide sequence encoding an immune checkpoint inhibitor polypeptide) comprise a non-hydrolyzable cap structure preventing decapping and thus increasing mRNA half-life. Because cap structure hydrolysis requires cleavage of 5′-ppp-5′ phosphorodiester linkages, modified nucleotides can be used during the capping reaction. For example, a Vaccinia Capping Enzyme from New England Biolabs (Ipswich, MA) can be used with α-thio-guanosine nucleotides according to the manufacturer's instructions to create a phosphorothioate linkage in the 5′-ppp-5′ cap. Additional modified guanosine nucleotides can be used such as α-methyl-phosphonate and seleno-phosphate nucleotides.

[1232] Additional modifications include, but are not limited to, 2′-O-methylation of the ribose sugars of 5′-terminal and/or 5′-anteterminal nucleotides of the polynucleotide (as mentioned above) on the 2′-hydroxyl group of the sugar ring. Multiple distinct 5′-cap structures can be used to generate the 5′-cap of a nucleic acid molecule, such as a polynucleotide that functions as an mRNA molecule. Cap analogs, which herein are also referred to as synthetic cap analogs, chemical caps, chemical cap analogs, or structural or functional cap analogs, differ from natural (i.e., endogenous, wild-type or physiological) 5′-caps in their chemical structure, while retaining cap function. Cap analogs can be chemically (i.e., non-enzymatically) or enzymatically synthesized and/or linked to the polynucleotides of the invention.

[1233] For example, the Anti-Reverse Cap Analog (ARCA) cap contains two guanines linked by a 5′-5′-triphosphate group, wherein one guanine contains an N7 methyl group as well as a 3′-O-methyl group (i.e., N7,3′-O-dimethyl-guanosine-5′-triphosphate-5′-guanosine (m7G-3′mppp-G; which can equivalently be designated 3′ O-Me-m7G(5′)ppp(5′)G). The 3′-0 atom of the other, unmodified, guanine becomes linked to the 5′-terminal nucleotide of the capped polynucleotide. The N7- and 3′-O-methlyated guanine provides the terminal moiety of the capped polynucleotide.

[1234] Another exemplary cap is mCAP, which is similar to ARCA but has a 2′-O-methyl group on guanosine (i.e., N7,2′-O-dimethyl-guanosine-5′-triphosphate-5′-guanosine, m7Gm-ppp-G).

[1235] Another exemplary cap is m⁷G-ppp-Gm-A (i.e., N7,guanosine-5′-triphosphate-2′-O-dimethyl-guanosine-adenosine).

[1236] In some embodiments, the cap is a dinucleotide cap analog. As a non-limiting example, the dinucleotide cap analog can be modified at different phosphate positions with a boranophosphate group or a phosphoroselenoate group such as the dinucleotide cap analogs described in U.S. Pat. No. 8,519,110, the contents of which are herein incorporated by reference in its entirety.

[1237] In another embodiment, the cap is a cap analog is a N7-(4-chlorophenoxyethyl) substituted dinucleotide form of a cap analog known in the art and/or described herein. Non-limiting examples of a N7-(4-chlorophenoxyethyl) substituted dinucleotide form of a cap analog include a N7-(4-chlorophenoxyethyl)-G(5′)ppp(5′)G and a N7-(4-chlorophenoxyethyl)-m3′-OG(5′)ppp(5′)G cap analog (See, e.g., the various cap analogs and the methods of synthesizing cap analogs described in Kore et al. Bioorganic & Medicinal Chemistry 2013 21:4570-4574; the contents of which are herein incorporated by reference in its entirety). In another embodiment, a cap analog of the present invention is a 4-chloro/bromophenoxyethyl analog.

[1238] While cap analogs allow for the concomitant capping of a polynucleotide or a region thereof, in an in vitro transcription reaction, up to 20% of transcripts can remain uncapped. This, as well as the structural differences of a cap analog from an endogenous 5′-cap structures of nucleic acids produced by the endogenous, cellular transcription machinery, can lead to reduced translational competency and reduced cellular stability.

[1239] Polynucleotides of the invention (e.g., a polynucleotide comprising a nucleotide sequence encoding an immune checkpoint inhibitor polypeptide) can also be capped post-manufacture (whether IVT or chemical synthesis), using enzymes, to generate more authentic 5′-cap structures. As used herein, the phrase “more authentic” refers to a feature that closely mirrors or mimics, either structurally or functionally, an endogenous or wild type feature. That is, a “more authentic” feature is better representative of an endogenous, wild-type, natural or physiological cellular function and/or structure as compared to synthetic features or analogs, etc., of the prior art, or which outperforms the corresponding endogenous, wild-type, natural or physiological feature in one or more respects. Non-limiting examples of more authentic 5′cap structures of the present invention are those that, among other things, have enhanced binding of cap binding proteins, increased half-life, reduced susceptibility to 5′ endonucleases and/or reduced 5′ decapping, as compared to synthetic 5′ cap structures known in the art (or to a wild-type, natural or physiological 5′ cap structure). For example, recombinant Vaccinia Virus Capping Enzyme and recombinant 2′-O-methyltransferase enzyme can create a canonical 5′-5′-triphosphate linkage between the 5′-terminal nucleotide of a polynucleotide and a guanine cap nucleotide wherein the cap guanine contains an N7 methylation and the 5′-terminal nucleotide of the mRNA contains a 2′-O-methyl. Such a structure is termed the Cap1 structure. This cap results in a higher translational-competency and cellular stability and a reduced activation of cellular proinflammatory cytokines, as compared, e.g., to other 5′ cap analog structures known in the art. Cap structures include, but are not limited to, 7mG(5′)ppp(5′)N,pN2p (cap 0), 7mG(5′)ppp(5′)NlmpN2p (cap 1), and 7mG(5′)-ppp(5′)NlmpN2mp (cap 2). Cap 1 is sometimes referred to as Cap C1 herein. In some embodiments, Cap C1 can optionally include an additional G at the 3′ end of the cap. In some embodiments, in Cap C1, N2 may comprise the first nucleotide of a 5′ UTR.

[1240] As a non-limiting example, capping chimeric polynucleotides post-manufacture can be more efficient as nearly 100% of the chimeric polynucleotides can be capped. This is in contrast to ˜80% efficiency when a cap analog is linked to a chimeric polynucleotide during an in vitro transcription reaction.

[1241] According to the present invention, 5′ terminal caps can include endogenous caps or cap analogs. According to the present invention, a 5′ terminal cap can comprise a guanine analog. Useful guanine analogs include, but are not limited to, inosine, N1-methyl-guanosine, 2′fluoro-guanosine, 7-deaza-guanosine, 8-oxo-guanosine, 2-amino-guanosine, LNA-guanosine, and 2-azido-guanosine.

[1242] Also provided herein are exemplary caps including those that can be used in co-transcriptional capping methods for ribonucleic acid (RNA) synthesis, using RNA polymerase, e.g., wild type RNA polymerase or variants thereof, e.g., such as those variants described herein. In one embodiment, caps can be added when RNA is produced in a “one-pot” reaction, without the need for a separate capping reaction. Thus, the methods, in some embodiments, comprise reacting a polynucleotide template with an RNA polymerase variant, nucleoside triphosphates, and a cap analog under in vitro transcription reaction conditions to produce RNA transcript.

[1243] A cap analog may be, for example, a dinucleotide cap, a trinucleotide cap, or a tetranucleotide cap. In some embodiments, a cap analog is a dinucleotide cap. In some embodiments, a cap analog is a trinucleotide cap. In some embodiments, a cap analog is a tetranucleotide cap. As used here the term “cap” includes the inverted G nucleotide and can comprise one or more additional nucleotides 3′ of the inverted G nucleotide, e.g., 1, 2, or more nucleotides 3′ of the inverted G nucleotide and 5′ to the 5′ UTR, e.g., a 5′ UTR described herein.

[1244] Exemplary caps comprise a sequence of GG, GA, or GGA, wherein the underlined, italicized G is an in inverted G nucleotide followed by a 5′-5′-triphosphate group. In one embodiment, the cap comprises m⁷GpppG_{2′OMe}pA.

A trinucleotide cap, in some embodiments, comprises a compound of formula (I)

[chemical structure]

or a stereoisomer, tautomer or salt thereof, wherein

[chemical structure]

[1245] ring B1 is a modified or unmodified Guanine;
[1246] ring B2 and ring B3 each independently is a nucleobase or a modified nucleobase;
[1247] X2 is O, S(O)p, NR24 or CR25R26 in which p is 0, 1, or 2;
[1248] Y0 is O or CR6R7;
[1249] Y1 is O, S(O)n, CR6R7, or NR8, in which n is 0, 1, or 2;
[1250] each [symbol] is a single bond or absent, wherein when each [symbol] is a single bond, Y1 is O, S(O)n, CR6R7, or NR8; and when each [symbol] is absent, Y1 is void;
[1251] Y2 is (OP(O)R4)m in which m is 0, 1, or 2, or —O—(CR40R41)u-Q0-(CR42R43)v-, in which Q0 is a bond, O, S(O)r, NR44, or CR45R46, r is 0, 1, or 2, and each of u and v independently is 1, 2, 3 or 4;
[1252] each R2 and R2′ independently is halo, LNA, or OR3;
   each R3 independently is H, C1-C6 alkyl, C2-C6 alkenyl, or C2-C6 alkynyl and R3, when being C1-C6 alkyl, C2-C6 alkenyl, or C2-C6 alkynyl, is optionally substituted with one or more of halo, OH and C1-C6 alkoxyl that is optionally substituted with one or more OH or OC(O)—C1-C6 alkyl;
[1253] each R4 and R4′ independently is H, halo, C1-C6 alkyl, OH, SH, SeH, or BH3-;
[1254] each of R6, R7, and R8, independently, is -Q1-T1, in which Q1 is a bond or C1-C3 alkyl linker optionally substituted with one or more of halo, cyano, OH and C1-C6 alkoxy, and T1 is H, halo, OH, COOH, cyano, or Rs1, in which Rs1 is C1-C3 alkyl, C2-C6 alkenyl, C2-C6 alkynyl, C1-C6 alkoxyl, C(O)O—C1-C6 alkyl, C3-C8 cycloalkyl, C6-C10 aryl, NR31R32, (NR31R32R33)+, 4 to 12-membered heterocycloalkyl, or 5- or 6-membered heteroaryl, and Rs1 is optionally substituted with one or more substituents selected from the group consisting of halo, OH, oxo, C1-C6 alkyl, COOH, C(O)O—C1-C6 alkyl, cyano, C1-C6 alkoxyl, NR31R32, (NR31R32R33)+, C3-C8 cycloalkyl, C6-C10 aryl, 4 to 12-membered heterocycloalkyl, and 5- or 6-membered heteroaryl;
[1255] each of R10, R11, R12, R13 R14, and R15, independently, is -Q2-T2, in which Q2 is a bond or C1-C3 alkyl linker optionally substituted with one or more of halo, cyano, OH and C1-C6 alkoxy, and T2 is H, halo, OH, NH2, cyano, NO2, N3, Rs2, or ORs2, in which Rs2 is C1-C6 alkyl, C2-C6 alkenyl, C2-C6 alkynyl, C3-C8 cycloalkyl, C6-C10 aryl, NHC(O)—C1-C6 alkyl, NR31R32, (NR31R32R33)+, 4 to 12-membered heterocycloalkyl, or 5- or 6-membered heteroaryl, and Rs2 is optionally substituted with one or more substituents selected from the group consisting of halo, OH, oxo, C1-C6 alkyl, COOH, C(O)O—C1-C6 alkyl, cyano, C1-C6 alkoxyl, NR31R32, (NR31R32R33)+, C3-C8 cycloalkyl, C6-C10 aryl, 4 to 12-membered heterocycloalkyl, and 5- or 6-membered heteroaryl; or alternatively R12 together with R14 is oxo, or R13 together with R15 is oxo,
[1256] each of R20, R21, R22, and R23 independently is -Q3-T3, in which Q3 is a bond or C1-C3 alkyl linker optionally substituted with one or more of halo, cyano, OH and C1-C6 alkoxy, and T3 is H, halo, OH, NH2, cyano, NO2, N3, RS3, or ORS3, in which RS3 is C1-C6 alkyl, C2-C6 alkenyl, C2-C6 alkynyl, C3-C8 cycloalkyl, C6-C10 aryl, NHC(O)—C1-C6 alkyl, mono-C1-C6 alkylamino, di-C1-C6 alkylamino, 4 to 12-membered heterocycloalkyl, or 5- or 6-membered heteroaryl, and Rs3 is optionally substituted with one or more substituents selected from the group consisting of halo, OH, oxo, C1-C6 alkyl, COOH, C(O)O—C1-C6 alkyl, cyano, C1-C6 alkoxyl, amino, mono-C1-C6 alkylamino, di-C1-C6 alkylamino, C3-C8 cycloalkyl, C6-C10 aryl, 4 to 12-membered heterocycloalkyl, and 5- or 6-membered heteroaryl;
[1257] each of R24, R25, and R26 independently is H or C1-C6 alkyl;
[1258] each of R27 and R28 independently is H or OR29; or R27 and R28 together form O—R30-O; each R29 independently is H, C1-C6 alkyl, C2-C6 alkenyl, or C2-C6 alkynyl and R29, when being C1-C6 alkyl, C2-C6 alkenyl, or C2-C6 alkynyl, is optionally substituted with one or more of halo, OH and C1-C6 alkoxyl that is optionally substituted with one or more OH or OC(O)—C1-C6 alkyl;
[1259] R30 is C1-C6 alkylene optionally substituted with one or more of halo, OH and C1-C6 alkoxyl;
[1260] each of R31, R32, and R33, independently is H, C1-C6 alkyl, C3-C8 cycloalkyl, C6-C10 aryl, 4 to 12-membered heterocycloalkyl, or 5- or 6-membered heteroaryl;
[1261] each of R40, R41, R42, and R43 independently is H, halo, OH, cyano, N3, OP(O)R47R48, or C1-C6 alkyl optionally substituted with one or more OP(O)R47R48, or one R41 and one R43, together with the carbon atoms to which they are attached and Q0, form C4-C10 cycloalkyl, 4- to 14-membered heterocycloalkyl, C6-C10 aryl, or 5- to 14-membered heteroaryl, and each of the cycloalkyl, heterocycloalkyl, phenyl, or 5- to 6-membered heteroaryl is optionally substituted with one or more of OH, halo, cyano, N3, oxo, OP(O)R47R48, C1-C6 alkyl, C1-C6 haloalkyl, COOH, C(O)O—C1-C6 alkyl, C1-C6 alkoxyl, C1-C6 haloalkoxyl, amino, mono-C1-C6 alkylamino, and di-C1-C6 alkylamino;
   R44 is H, C1-C6 alkyl, or an amine protecting group;
   each of R45 and R46 independently is H, OP(O)R47R48, or C1-C6 alkyl optionally substituted with one or more OP(O)R47R48, and
   each of R47 and R48, independently is H, halo, C1-C6 alkyl, OH, SH, SeH, or BH3.

[1262] It should be understood that a cap analog, as provided herein, may include any of the cap analogs described in international publication WO 2017/066797, published on 20 Apr. 2017, incorporated by reference herein in its entirety.

[1263] In some embodiments, the B2 middle position can be a non-ribose molecule, such as arabinose.

[1264] In some embodiments R2 is ethyl-based.

[1265] Thus, in some embodiments, a trinucleotide cap comprises the following structure:

[chemical structure]

[1266] In other embodiments, a trinucleotide cap comprises the following structure:

[chemical structure]

[1267] In yet other embodiments, a trinucleotide cap comprises the following structure:

[chemical structure]

In still other embodiments, a trinucleotide cap comprises the following structure:

[chemical structure]

[1268] In some embodiments, R is an alkyl (e.g., C₁-C₆ alkyl). In some embodiments, R is a methyl group (e.g., C₁ alkyl). In some embodiments, R is an ethyl group (e.g., C₂ alkyl).

[1269] A dinucleotide cap, in some embodiments, comprises a compound of formula (I-b)

[chemical structure]

stereoisomer, tautomer or salt thereof, wherein

[chemical structure]

[1270] ring B1 is a modified or unmodified Guanine;
[1271] ring B2 is a nucleobase or a modified nucleobase;
[1272] X2 is O, S(O)p, NR24 or CR25R26 in which p is 0, 1, or 2;
[1273] Y0 is O or CR6R7;
[1274] Y1 is O, S(O)n, CR6R7, or NR8, in which n is 0, 1, or 2;
[1275] each --- is a single bond or absent, wherein when each --- is a single bond, Y1 is O, S(O)n, CR6R7, or NR8; and when each --- is absent, Y1 is void;
[1276] Y2 is (OP(O)R4)m in which m is 0, 1, or 2, or —O—(CR40R41)u-Q0-(CR42R43)v-, in which Q0 is a bond, O, S(O)r, NR44, or CR45R46, r is 0, 1, or 2, and each of u and v independently is 1, 2, 3 or 4;
[1277] R2 is halo, LNA, or OR3;
   each R3 independently is H, C1-C6 alkyl, C2-C6 alkenyl, or C2-C6 alkynyl and R3, when being C1-C6 alkyl, C2-C6 alkenyl, or C2-C6 alkynyl, is optionally substituted with one or more of halo, OH and C1-C6 alkoxyl that is optionally substituted with one or more OH or OC(O)—C1-C6 alkyl;
[1278] R4 is H, halo, C1-C6 alkyl, OH, SH, SeH, or BH3-;
[1279] each of R6, R7, and R8, independently, is -Q1-T1, in which Q1 is a bond or C1-C3 alkyl linker optionally substituted with one or more of halo, cyano, OH and C1-C6 alkoxy, and T1 is H, halo, OH, COOH, cyano, or Rs1, in which Rs1 is C1-C3 alkyl, C2-C6 alkenyl, C2-C6 alkynyl, C1-C6 alkoxyl, C(O)O—C1-C6 alkyl, C3-C8 cycloalkyl, C6-C10 aryl, NR31R32, (NR31R32R33)⁺, 4 to 12-membered heterocycloalkyl, or 5- or 6-membered heteroaryl, and Rs1 is optionally substituted with one or more substituents selected from the group consisting of halo, OH, oxo, C1-C6 alkyl, COOH, C(O)O—C1-C6 alkyl, cyano, C1-C6 alkoxyl, NR31R32, (NR31R32R33)+, C3-C8 cycloalkyl, C6-C10 aryl, 4 to 12-membered heterocycloalkyl, and 5- or 6-membered heteroaryl;
[1280] each of R10, R11, R12, R13 R14, and R15, independently, is -Q2-T2, in which Q2 is a bond or C1-C3 alkyl linker optionally substituted with one or more of halo, cyano, OH and C1-C6 alkoxy, and T2 is H, halo, OH, NH2, cyano, NO2, N3, Rs2, or ORs2, in which Rs2 is C1-C6 alkyl, C2-C6 alkenyl, C2-C6 alkynyl, C3-C8 cycloalkyl, C6-C10 aryl, NHC(O)—C1-C6 alkyl, NR31R32, (NR31R32R33)⁺, 4 to 12-membered heterocycloalkyl, or 5- or 6-membered heteroaryl, and Rs2 is optionally substituted with one or more substituents selected from the group consisting of halo, OH, oxo, C1-C6 alkyl, COOH, C(O)O—C1-C6 alkyl, cyano, C1-C6 alkoxyl, NR31R32, (NR31R32R33)⁺, C3-C8 cycloalkyl, C6-C10 aryl, 4 to 12-membered heterocycloalkyl, and 5- or 6-membered heteroaryl; or alternatively R12 together with R14 is oxo, or R13 together with R15 is oxo,
[1281] each of R20, R21, R22, and R23 independently is -Q3-T3, in which Q3 is a bond or C1-C3 alkyl linker optionally substituted with one or more of halo, cyano, OH and C1-C6 alkoxy, and T3 is H, halo, OH, NH2, cyano, NO2, N3, RS3, or ORS3, in which RS3 is C1-C6 alkyl, C2-C6 alkenyl, C2-C6 alkynyl, C3-C8 cycloalkyl, C6-C10 aryl, NHC(O)—C1-C6 alkyl, mono-C1-C6 alkylamino, di-C1-C6 alkylamino, 4 to 12-membered heterocycloalkyl, or 5- or 6-membered heteroaryl, and Rs3 is optionally substituted with one or more substituents selected from the group consisting of halo, OH, oxo, C1-C6 alkyl, COOH, C(O)O—C1-C6 alkyl, cyano, C1-C6 alkoxyl, amino, mono-C1-C6 alkylamino, di-C1-C6 alkylamino, C3-C8 cycloalkyl, C6-C10 aryl, 4 to 12-membered heterocycloalkyl, and 5- or 6-membered heteroaryl;
[1282] each of R24, R25, and R26 independently is H or C1-C6 alkyl;
[1283] each of R27 and R28 independently is H or OR29; or R27 and R28 together form O—R30-O; each R29 independently is H, C1-C6 alkyl, C2-C6 alkenyl, or C2-C6 alkynyl and R29, when being C1-C6 alkyl, C2-C6 alkenyl, or C2-C6 alkynyl, is optionally substituted with one or more of halo, OH and C1-C6 alkoxyl that is optionally substituted with one or more OH or OC(O)—C1-C6 alkyl;
[1284] R30 is C1-C6 alkylene optionally substituted with one or more of halo, OH and C1-C6 alkoxyl;
[1285] each of R31, R32, and R33, independently is H, C1-C6 alkyl, C3-C8 cycloalkyl, C6-C10 aryl, 4 to 12-membered heterocycloalkyl, or 5- or 6-membered heteroaryl;
[1286] each of R40, R41, R42, and R43 independently is H, halo, OH, cyano, N3, OP(O)R47R48, or C1-C6 alkyl optionally substituted with one or more OP(O)R47R48, or one R41 and one R43, together with the carbon atoms to which they are attached and Q0, form C4-C10 cycloalkyl, 4- to 14-membered heterocycloalkyl, C6-C10 aryl, or 5- to 14-membered heteroaryl, and each of the cycloalkyl, heterocycloalkyl, phenyl, or 5- to 6-membered heteroaryl is optionally substituted with one or more of OH, halo, cyano, N3, oxo, OP(O)R47R48, C1-C6 alkyl, C1-C6 haloalkyl, COOH, C(O)O—C1-C6 alkyl, C1-C6 alkoxyl, C1-C6 haloalkoxyl, amino, mono-C1-C6 alkylamino, and di-C1-C6 alkylamino;
   R44 is H, C1-C6 alkyl, or an amine protecting group;
   each of R45 and R46 independently is H, OP(O)R47R48, or C1-C6 alkyl optionally substituted with one or more OP(O)R47R48, and
   each of R47 and R48, independently is H, halo, C1-C6 alkyl, OH, SH, SeH, or BH3.

[1287] Thus, in some embodiments, a dinucleotide cap comprises the following structure:

[chemical structure]

[1288] A trinucleotide cap, in some embodiments, comprises a sequence selected from the following sequences: GAA, GAC, GAG, GAU, GCA, GCC, GCG, GCU, GGA, GGC, GGG, GGU, GUA, GUC, GUG, and GUU. In some embodiments, a trinucleotide cap comprises GAA.

[1289] In some embodiments, a trinucleotide cap comprises GAC. In some embodiments, a trinucleotide cap comprises GAG. In some embodiments, a trinucleotide cap comprises GAU. In some embodiments, a trinucleotide cap comprises GCA. In some embodiments, a trinucleotide cap comprises GCC. In some embodiments, a trinucleotide cap comprises GCG. In some embodiments, a trinucleotide cap comprises GCU. In some embodiments, a trinucleotide cap comprises GGA. In some embodiments, a trinucleotide cap comprises GGC. In some embodiments, a trinucleotide cap comprises GGG. In some embodiments, a trinucleotide cap comprises GGU. In some embodiments, a trinucleotide cap comprises GUA. In some embodiments, a trinucleotide cap comprises GUC. In some embodiments, a trinucleotide cap comprises GUG. In some embodiments, a trinucleotide cap comprises GUU.

[1290] In some embodiments, a trinucleotide cap comprises a sequence selected from the following sequences: m⁷GpppApA, m⁷GpppApC, m⁷GpppApG, m⁷GpppApU, m⁷GpppCpA, m⁷GpppCpC, m⁷GpppCpG, m⁷GpppCpU, m⁷GpppGpA, m⁷GpppGpC, m⁷GpppGpG, m⁷GpppGpU, m⁷GpppUpA, m⁷GpppUpC, m⁷GpppUpG, and m⁷GpppUpU.

[1291] In some embodiments, a trinucleotide cap comprises m⁷GpppApA. In some embodiments, a trinucleotide cap comprises m⁷GpppApC. In some embodiments, a trinucleotide cap comprises m⁷GpppApG. In some embodiments, a trinucleotide cap comprises m⁷GpppApU.

[1292] In some embodiments, a trinucleotide cap comprises m⁷GpppCpA. In some embodiments, a trinucleotide cap comprises m⁷GpppCpC. In some embodiments, a trinucleotide cap comprises m⁷GpppCpG. In some embodiments, a trinucleotide cap comprises m⁷GpppCpU. In some embodiments, a trinucleotide cap comprises m⁷GpppGpA. In some embodiments, a trinucleotide cap comprises m⁷GpppGpC. In some embodiments, a trinucleotide cap comprises m⁷GpppGpG.

[1293] In some embodiments, a trinucleotide cap comprises m⁷GpppGpU. In some embodiments, a trinucleotide cap comprises m⁷GpppUpA. In some embodiments, a trinucleotide cap comprises m⁷GpppUpC. In some embodiments, a trinucleotide cap comprises m⁷GpppUpG. In some embodiments, a trinucleotide cap comprises m⁷GpppUpU.

[1294] A trinucleotide cap, in some embodiments, comprises a sequence selected from the following sequences: m⁷G_{3′OMe}pppApA, m⁷G_{3′OMe}pppApC, m⁷G_{3′OMe}pppApG, m⁷G_{3′OMe}pppApU, m⁷G_{3′OMe}pppCpA, m⁷G_{3′OMe}pppCpC, m⁷G_{3′OMe}pppCpG, m⁷G_{3′OMe}pppCpU, m⁷G_{3′OMe}pppGpA, m⁷G_{3′OMe}pppGpC, m⁷G_{3′OMe}pppGpG, m⁷G_{3′OMe}pppGpU, m⁷G_{3′OMe}pppUpA, m⁷G_{3′OMe}pppUpC, m⁷G_{3′OMe}pppUpG, and m⁷G_{3′OMe}pppUpU.

[1295] In some embodiments, a trinucleotide cap comprises m⁷G_{3′OMe}pppApA. In some embodiments, a trinucleotide cap comprises m⁷G_{3′OMe}pppApC. In some embodiments, a trinucleotide cap comprises m⁷G_{3′OMe}pppApG. In some embodiments, a trinucleotide cap comprises m⁷G_{3′OMe}pppApU. In some embodiments, a trinucleotide cap comprises m⁷G_{3′OMe}pppCpA. In some embodiments, a trinucleotide cap comprises m⁷G_{3′OMe}pppCpC. In some embodiments, a trinucleotide cap comprises m⁷G_{3′OMe}pppCpG. In some embodiments, a trinucleotide cap comprises m⁷G_{3′OMe}pppCpU. In some embodiments, a trinucleotide cap comprises m⁷G_{3′OMe}pppGpA. In some embodiments, a trinucleotide cap comprises m⁷G_{3′OMe}pppGpC. In some embodiments, a trinucleotide cap comprises m⁷G_{3′OMe}pppGpG. In some embodiments, a trinucleotide cap comprises m⁷G_{3′OMe}pppGpU. In some embodiments, a trinucleotide cap comprises m⁷G_{3′OMe}pppUpA. In some embodiments, a trinucleotide cap comprises m⁷G_{3′OMe}pppUpC. In some embodiments, a trinucleotide cap comprises m⁷G_{3′OMe}pppUpG. In some embodiments, a trinucleotide cap comprises m⁷G_{3′OMe}pppUpU. A trinucleotide cap, in other embodiments, comprises a sequence selected from the following sequences: m⁷G_{3′OMe}pppA_{2′OMe}pA, m⁷G_{3′OMe}pppA_{2′OMe}pC, m⁷G_{3′OMe}pppA_{2′OMe}pG, m⁷G_{3′OMe}pppA_{2′OMe}pU, m⁷G_{3′OMe}pppC_{2′OMe}pA, m⁷G_{3′OMe}pppC_{2′OMe}pC, m⁷G_{3′OMe}pppC_{2′OMe}pG, m⁷G_{3′OMe}pppC_{2′OMe}pU, m⁷G_{3′OMe}pppG_{2′OMe}pA, m⁷G_{3′OMe}pppG_{2′OMe}pC, m⁷G_{3′OMe}pppG_{2′OMe}pG, m⁷G_{3′OMe}pppG_{2′OMe}pU, m⁷G_{3′OMe}pppU_{2′OMe}pA, m⁷G_{3′OMe}pppU_{2′OMe}pC, m⁷G_{3′OMe}pppU_{2′OMe}pG, and m⁷G_{3′OMe}pppU_{2′OMe}pU.

[1296] In some embodiments, a trinucleotide cap comprises m⁷G_{3′OMe}pppA_{2′OMe}pA. In some embodiments, a trinucleotide cap comprises m⁷G_{3′OMe}pppA_{2′OMe}pC. In some embodiments, a trinucleotide cap comprises m⁷G_{3′OMe}pppA_{2′OMe}pG. In some embodiments, a trinucleotide cap comprises m⁷G_{3′OMe}pppA_{2′OMe}pU. In some embodiments, a trinucleotide cap comprises m⁷G_{3′OMe}pppC_{2′OMe}pA. In some embodiments, a trinucleotide cap comprises m⁷G_{3′OMe}pppC_{2′OMe}pC. In some embodiments, a trinucleotide cap comprises m⁷G_{3′OMe}pppC_{2′OMe}pG. In some embodiments, a trinucleotide cap comprises m⁷G_{3′OMe}pppC_{2′OMe}pU. In some embodiments, a trinucleotide cap comprises m⁷G_{3′OMe}pppG_{2′OMe}pA. In some embodiments, a trinucleotide cap comprises m⁷G_{3′OMe}pppG_{2′OMe}pC. In some embodiments, a trinucleotide cap comprises m⁷G_{3′OMe}pppG_{2′OMe}pG. In some embodiments, a trinucleotide cap comprises m⁷G_{3′OMe}pppG_{2′OMe}pU. In some embodiments, a trinucleotide cap comprises m⁷G_{3′OMe}pppU_{2′OMe}pA. In some embodiments, a trinucleotide cap comprises m⁷G_{3′OMe}pppU_{2′OMe}pC. In some embodiments, a trinucleotide cap comprises m⁷G_{3′OMe}pppU_{2′OMe}pG. In some embodiments, a trinucleotide cap comprises m⁷G_{3′OMe}pppU_{2′OMe}pU.

[1297] A trinucleotide cap, in still other embodiments, comprises a sequence selected from the following sequences: m⁷GpppA_{2′OMe}pA, m⁷GpppA_{2′OMe}pC, m⁷GpppA_{2′OMe}pG, m⁷GpppA_{2′OMe}pU, m⁷GpppC_{2′OMe}pA, m⁷GpppC_{2′OMe}pC, m⁷GpppC_{2′OMe}pG, m⁷GpppC_{2′OMe}pU, m⁷GpppG_{2′OMe}pA, m⁷GpppG_{2′OMe}pC, m⁷GpppG_{2′OMe}pG, m⁷GpppG_{2′OMe}pU, m⁷GpppU_{2′OMe}pA, m⁷GpppU_{2′OMe}pC, m⁷GpppU_{2′OMe}pG, and m⁷GpppU_{2′OMe}pU.

[1298] In some embodiments, a trinucleotide cap comprises m⁷GpppA_{2′OMe}pA. In some embodiments, a trinucleotide cap comprises m⁷GpppA_{2′OMe}pC. In some embodiments, a trinucleotide cap comprises m⁷GpppA_{2′OMe}pG. In some embodiments, a trinucleotide cap comprises m⁷GpppA_{2′OMe}pU. In some embodiments, a trinucleotide cap comprises m⁷GpppC_{2′OMe}pA. In some embodiments, a trinucleotide cap comprises m⁷GpppC_{2′OMe}pC. In some embodiments, a trinucleotide cap comprises m⁷GpppC_{2′OMe}pG. In some embodiments, a trinucleotide cap comprises m⁷GpppC_{2′OMe}pU. In some embodiments, a trinucleotide cap comprises m⁷GpppG_{2′OMe}pA. In some embodiments, a trinucleotide cap comprises m⁷GpppG_{2′OMe}pC. In some embodiments, a trinucleotide cap comprises m⁷GpppG_{2′OMe}pG. In some embodiments, a trinucleotide cap comprises m⁷GpppG_{2′OMe}pU. In some embodiments, a trinucleotide cap comprises m⁷GpppU_{2′OMe}pA. In some embodiments, a trinucleotide cap comprises m⁷GpppU_{2′OMe}pC. In some embodiments, a trinucleotide cap comprises m⁷GpppU_{2′OMe}pG. In some embodiments, a trinucleotide cap comprises m⁷GpppU_{2′OMe}pU.

[1299] In some embodiments, a trinucleotide cap comprises m⁷Gpppm⁶A_{2′Ome}pG. In some embodiments, a trinucleotide cap comprises m⁷Gpppe⁶A_{2′Ome}pG.

[1300] In some embodiments, a trinucleotide cap comprises GAG. In some embodiments, a trinucleotide cap comprises GCG. In some embodiments, a trinucleotide cap comprises GUG. In some embodiments, a trinucleotide cap comprises GGG.

[1301] In some embodiments, a trinucleotide cap comprises any one of the following structures:

[chemical structure]

[1302] In some embodiments, the cap analog comprises a tetranucleotide cap. In some embodiments, the tetranucleotide cap comprises a trinucleotide as set forth above. In some embodiments, the tetranucleotide cap comprises ^{m7}GpppN₁N₂N₃, where N₁, N₂, and N₃ are optional (i.e., can be absent or one or more can be present) and are independently a natural, a modified, or an unnatural nucleoside base. In some embodiments, ^{m7}G is further methylated, e.g., at the 3′ position. In some embodiments, the ^{m7}G comprises an O-methyl at the 3′ position. In some embodiments N₁, N₂, and N₃ if present, optionally, are independently an adenine, a uracil, a guanidine, a thymine, or a cytosine. In some embodiments, one or more (or all) of N₁, N₂, and N₃, if present, are methylated, e.g., at the 2′ position. In some embodiments, one or more (or all) of N₁, N₂, and N₃, if present have an O-methyl at the 2′ position.

[1303] In some embodiments, the tetranucleotide cap comprises the following structure:

[chemical structure]

[1304] wherein B₁, B₂, and B₃ are independently a natural, a modified, or an unnatural nucleoside based; and R₁, R₂, R₃, and R₄ are independently OH or O-methyl. In some embodiments, R₃ is O-methyl and R₄ is OH. In some embodiments, R₃ and R₄ are O-methyl. In some embodiments, R₄ is O-methyl. In some embodiments, R₁ is OH, R₂ is OH, R₃ is O-methyl, and R₄ is OH. In some embodiments, R₁ is OH, R₂ is OH, R₃ is O-methyl, and R₄ is O-methyl. In some embodiments, at least one of R₁ and R₂ is O-methyl, R₃ is O-methyl, and R₄ is OH. In some embodiments, at least one of R₁ and R₂ is O-methyl, R₃ is O-methyl, and R₄ is O-methyl.

[1305] In some embodiments, B₁, B₃, and B₃ are natural nucleoside bases. In some embodiments, at least one of B₁, B₂, and B₃ is a modified or unnatural base. In some embodiments, at least one of B₁, B₂, and B₃ is N₆-methyladenine. In some embodiments, B₁ is adenine, cytosine, thymine, or uracil. In some embodiments, B₁ is adenine, B₂ is uracil, and B₃ is adenine. In some embodiments, R₁ and R₂ are OH, R₃ and R₄ are O-methyl, B₁ is adenine, B₂ is uracil, and B₃ is adenine.

[1306] In some embodiments the tetranucleotide cap comprises a sequence selected from the following sequences: GAAA, GACA, GAGA, GAUA, GCAA, GCCA, GCGA, GCUA, GGAA, GGCA, GGGA, GGUA, GUCA, and GUUA. In some embodiments the tetranucleotide cap comprises a sequence selected from the following sequences: GAAG, GACG, GAGG, GAUG, GCAG, GCCG, GCGG, GCUG, GGAG, GGCG, GGGG, GGUG, GUCG, GUGG, and GUUG. In some embodiments the tetranucleotide cap comprises a sequence selected from the following sequences: GAAU, GACU, GAGU, GAUU, GCAU, GCCU, GCGU, GCUU, GGAU, GGCU, GGGU, GGUU, GUAU, GUCU, GUGU, and GUUU. In some embodiments the tetranucleotide cap comprises a sequence selected from the following sequences: GAAC, GACC, GAGC, GAUC, GCAC, GCCC, GCGC, GCUC, GGAC, GGCC, GGGC, GGUC, GUAC, GUCC, GUGC, and GUUC.

[1307] A tetranucleotide cap, in some embodiments, comprises a sequence selected from the following sequences: m⁷G_{3′OMe}pppApApN, m⁷G_{3′OMe}pppApCpN, m⁷G_{3′OMe}pppApGpN, m⁷G_{3′OMe}pppApUpN, m⁷G_{3′OMe}pppCpApN, m⁷G_{3′OMe}pppCpCpN, m⁷G_{3′OMe}pppCpGpN, m⁷G_{3′OMe}pppCpUpN, m⁷G_{3′OMe}pppGpApN, m⁷G_{3′OMe}pppGpCpN, m⁷G_{3′OMe}pppGpGpN, m⁷G_{3′OMe}pppGpUpN, m⁷G_{3′OMe}pppUpApN, m⁷G_{3′OMe}pppUpCpN, m⁷G_{3′OMe}pppUpGpN, and m⁷G_{3′OMe}pppUpUpN, where N is a natural, a modified, or an unnatural nucleoside base.

[1308] A tetranucleotide cap, in other embodiments, comprises a sequence selected from the following sequences: m⁷G_{3′OMe}pppA_{2′OMe}pApN, m⁷G_{3′OMe}pppA_{2′OMe}pCpN, m⁷G_{3′OMe}pppA_{2′OMe}pGpN, m⁷G_{3′OMe}pppA_{2′OMe}pUpN, m⁷G_{3′OMe}pppC_{2′OMe}pApN, m⁷G_{3′OMe}pppC_{2′OMe}pCpN, m⁷G_{3′OMe}pppC_{2′OMe}pGpN, m⁷G_{3′OMe}pppC_{2′OMe}pUpN, m⁷G_{3′OMe}pppG_{2′OMe}pApN, m⁷G_{3′OMe}pppG_{2′OMe}pCpN, m⁷G_{3′OMe}pppG_{2′OMe}pGpN, m⁷G_{3′OMe}pppG_{2′OMe}pUpN, m⁷G_{3′OMe}pppU_{2′OMe}pApN, m⁷G_{3′OMe}pppU_{2′OMe}pCpN, m⁷G_{3′OMe}pppU_{2′OMe}pGpN, and m⁷G_{3′OMe}pppU_{2′OMe}pUpN, where N is a natural, a modified, or an unnatural nucleoside base.

[1309] A tetranucleotide cap, in still other embodiments, comprises a sequence selected from the following sequences: m⁷GpppA_{2′OMe}pApN, m⁷GpppA_{2′OMe}pCpN, m⁷GpppA_{2′OMe}pGpN, m⁷GpppA_{2′OMe}pUpN, m⁷GpppC_{2′OMe}pApN, m⁷GpppC_{2′OMe}pCpN, m⁷GpppC_{2′OMe}pGpN, m⁷GpppC_{2′OMe}pUpN, m⁷GpppG_{2′OMe}pApN, m⁷GpppG_{2′OMe}pCpN, m⁷GpppG_{2′OMe}pGpN, m⁷GpppG_{2′OMe}pUpN, m⁷GpppU_{2′OMe}pApN, m⁷GpppU_{2′OMe}pCpN, m⁷GpppU_{2′OMe}pGpN, and m⁷GpppU_{2′OMe}pUpN, where N is a natural, a modified, or an unnatural nucleoside base.

[1310] A tetranucleotide cap, in other embodiments, comprises a sequence selected from the following sequences: m⁷G_{3′OMe}pppA_{2′OMe}pA_{2′OMe}pN, m⁷G_{3′OMe}pppA_{2′OMe}pC_{2′OMe}pN, m⁷G_{3′OMe}pppA_{2′OMe}pG_{2′OMe}pN, m⁷G_{3′OMe}pppA_{2′OMe}pU_{2′OMe}pN, m⁷G_{3′OMe}pppC_{2′OMe}pA_{2′OMe}pN, m⁷G_{3′OMe}pppC_{2′OMe}pC_{2′OMe}pN, m⁷G_{3′OMe}pppC_{2′OMe}pG_{2′OMe}pN, m⁷G_{3′OMe}pppC_{2′OMe}pU_{2′OMe}pN, m⁷G_{3′OMe}pppG_{2′OMe}pA_{2′OMe}pN, m⁷G_{3′OMe}pppG_{2′OMe}pC_{2′OMe}pN, m⁷G_{3′OMe}pppG_{2′OMe}pG_{2′OMe}pN, m⁷G_{3′OMe}pppG_{2′OMe}pU_{2′OMe}pN, m⁷G_{3′OMe}pppU_{2′OMe}pA_{2′OMe}pN, m⁷G_{3′OMe}pppU_{2′OMe}pC_{2′OMe}pN, m⁷G_{3′OMe}pppU_{2′OMe}pG_{2′OMe}pN, and m⁷G_{3′OMe}pppU_{2′OMe}pU_{2′OMe}pN, where N is a natural, a modified, or an unnatural nucleoside base.

[1311] A tetranucleotide cap, in still other embodiments, comprises a sequence selected from the following sequences: m⁷GpppA_{2′OMe}pA_{2′OMe}pN, m⁷GpppA_{2′OMe}pC_{2′OMe}pN, m⁷GpppA_{2′OMe}pG_{2′OMe}pN, m⁷GpppA_{2′OMe}pU_{2′OMe}pN, m⁷GpppC_{2′OMe}pA_{2′OMe}pN, m⁷GpppC_{2′OMe}pC_{2′OMe}pN, m⁷GpppC_{2′OMe}pG_{2′OMe}pN, m⁷GpppC_{2′OMe}pU_{2′OMe}pN, m⁷GpppG_{2′OMe}pA_{2′OMe}pN, m⁷GpppG_{2′OMe}pC_{2′OMe}pN, m⁷GpppG_{2′OMe}pG_{2′OMe}pN, m⁷GpppG_{2′OMe}pU_{2′OMe}pN, m⁷GpppU_{2′OMe}pA_{2′OMe}pN, m⁷GpppU_{2′OMe}pC_{2′OMe}pN, m⁷GpppU_{2′OMe}pG_{2′OMe}pN, and m⁷GpppU_{2′OMe}pU_{2′OMe}pN, where N is a natural, a modified, or an unnatural nucleoside base.

[1312] In some embodiments, a tetranucleotide cap comprises GGAG. In some embodiments, a tetranucleotide cap comprises the following structure:

[chemical structure]

### Tails, e.g., Poly A Tails

[1313] In some embodiments, the polynucleotides of the present disclosure (e.g., a polynucleotide comprising a nucleotide sequence encoding an immune checkpoint inhibitor polypeptide) further comprise a tail, e.g., a poly-A tail. In further embodiments, terminal groups on the poly-A tail can be incorporated for stabilization. In other embodiments, a poly-A tail comprises des-3′ hydroxyl tails.

[1314] During RNA processing, a long chain of adenine nucleotides (poly-A tail) can be added to a polynucleotide such as an mRNA molecule to increase stability. Immediately after transcription, the 3′ end of the transcript can be cleaved to free a 3′ hydroxyl. Then poly-A polymerase adds a chain of adenine nucleotides to the RNA. The process, called polyadenylation, adds a poly-A tail that can be between, for example, approximately 80 to approximately 250 residues long, including approximately 80, 90, 100, 110, 120, 130, 140, 150, 160, 170, 180, 190, 200, 210, 220, 230, 240 or 250 residues long. In one embodiment, the poly-A tail is 100 nucleotides in length (SEQ ID NO:502).

(SEQ ID NO: 502)
aaaaaaaaaa aaaaaaaaaa aaaaaaaaaa aaaaaaaaaa
aaaaaaaaaa aaaaaaaaaa aaaaaaaaaa aaaaaaaaaa
aaaaaaaaaa aaaaaaaaaa

[1315] PolyA tails can also be added after the construct is exported from the nucleus.

[1316] According to the present invention, terminal groups on the poly A tail can be incorporated for stabilization. Polynucleotides of the present invention can include des-3′ hydroxyl tails. They can also include structural moieties or 2′-Omethyl modifications as taught by Junjie Li, et al. (Current Biology, Vol. 15, 1501-1507, Aug. 23, 2005, the contents of which are incorporated herein by reference in its entirety).

[1317] The polynucleotides of the present invention can be designed to encode transcripts with alternative polyA tail structures including histone mRNA. According to Norbury, “Terminal uridylation has also been detected on human replication-dependent histone mRNAs. The turnover of these mRNAs is thought to be important for the prevention of potentially toxic histone accumulation following the completion or inhibition of chromosomal DNA replication. These mRNAs are distinguished by their lack of a 3′ poly(A) tail, the function of which is instead assumed by a stable stem-loop structure and its cognate stem-loop binding protein (SLBP); the latter carries out the same functions as those of PABP on polyadenylated mRNAs” (Norbury, “Cytoplasmic RNA: a case of the tail wagging the dog,” Nature Reviews Molecular Cell Biology; AOP, published online 29 Aug. 2013; doi:10.1038/nrm3645) the contents of which are incorporated herein by reference in its entirety.

[1318] Unique poly-A tail lengths provide certain advantages to the polynucleotides of the present invention. Generally, the length of a poly-A tail, when present, is greater than 30 nucleotides in length. In another embodiment, the poly-A tail is greater than 35 nucleotides in length (e.g., at least or greater than about 35, 40, 45, 50, 55, 60, 70, 80, 90, 100, 120, 140, 160, 180, 200, 250, 300, 350, 400, 450, 500, 600, 700, 800, 900, 1,000, 1,100, 1,200, 1,300, 1,400, 1,500, 1,600, 1,700, 1,800, 1,900, 2,000, 2,500, and 3,000 nucleotides).

[1319] In some embodiments, the polynucleotide or region thereof includes from about 30 to about 3,000 nucleotides (e.g., from 30 to 50, from 30 to 100, from 30 to 250, from 30 to 500, from 30 to 750, from 30 to 1,000, from 30 to 1,500, from 30 to 2,000, from 30 to 2,500, from 50 to 100, from 50 to 250, from 50 to 500, from 50 to 750, from 50 to 1,000, from 50 to 1,500, from 50 to 2,000, from 50 to 2,500, from 50 to 3,000, from 100 to 500, from 100 to 750, from 100 to 1,000, from 100 to 1,500, from 100 to 2,000, from 100 to 2,500, from 100 to 3,000, from 500 to 750, from 500 to 1,000, from 500 to 1,500, from 500 to 2,000, from 500 to 2,500, from 500 to 3,000, from 1,000 to 1,500, from 1,000 to 2,000, from 1,000 to 2,500, from 1,000 to 3,000, from 1,500 to 2,000, from 1,500 to 2,500, from 1,500 to 3,000, from 2,000 to 3,000, from 2,000 to 2,500, and from 2,500 to 3,000).

[1320] In some embodiments, the poly-A tail is designed relative to the length of the overall polynucleotide or the length of a particular region of the polynucleotide. This design can be based on the length of a coding region, the length of a particular feature or region or based on the length of the ultimate product expressed from the polynucleotides.

[1321] In this context, the poly-A tail can be 10, 20, 30, 40, 50, 60, 70, 80, 90, or 100% greater in length than the polynucleotide or feature thereof. The poly-A tail can also be designed as a fraction of the polynucleotides to which it belongs. In this context, the poly-A tail can be 10, 20, 30, 40, 50, 60, 70, 80, or 90% or more of the total length of the construct, a construct region or the total length of the construct minus the poly-A tail. Further, engineered binding sites and conjugation of polynucleotides for Poly-A binding protein can enhance expression.

[1322] Additionally, multiple distinct polynucleotides can be linked together via the PABP (Poly-A binding protein) through the 3′-end using modified nucleotides at the 3′-terminus of the poly-A tail. Transfection experiments can be conducted in relevant cell lines at and protein production can be assayed by ELISA at 12 hr, 24 hr, 48 hr, 72 hr and day 7 post-transfection.

[1323] In some embodiments, the polynucleotides of the present invention are designed to include a polyA-G Quartet region. The G-quartet is a cyclic hydrogen bonded array of four guanine nucleotides that can be formed by G-rich sequences in both DNA and RNA. In this embodiment, the G-quartet is incorporated at the end of the poly-A tail. The resultant polynucleotide is assayed for stability, protein production and other parameters including half-life at various time points. It has been discovered that the polyA-G quartet results in protein production from an mRNA equivalent to at least 75% of that seen using a poly-A tail of 120 nucleotides alone (SEQ ID NO: 503).

(SEQ ID NO: 503)
aaaaaaaaaa aaaaaaaaaa aaaaaaaaaa aaaaaaaaaa
aaaaaaaaaa aaaaaaaaaa aaaaaaaaaa aaaaaaaaaa
aaaaaaaaaa aaaaaaaaaa aaaaaaaaaa aaaaaaaaaa

[1324] In some embodiments, the polyA tail comprises an alternative nucleoside, e.g., inverted thymidine. PolyA tails comprising an alternative nucleoside, e.g., inverted thymidine, may be generated as described herein. For instance, mRNA constructs may be modified by ligation to stabilize the poly(A) tail. Ligation may be performed using 0.5-1.5 mg/mL mRNA (5′ Cap1, 3′ A100), 50 mM Tris-HCl pH 7.5, 10 mM MgCl2, 1 mM TCEP, 1000 units/mL T4 RNA Ligase 1, 1 mM ATP, 20% w/v polyethylene glycol 8000, and 5:1 molar ratio of modifying oligo to mRNA. Modifying oligo has a sequence of 5′-phosphate-AAAAAAAAAAAAAAAAAAAA-(inverted deoxythymidine (idT) (SEQ ID NO:209)) (see below). Ligation reactions are mixed and incubated at room temperature (˜22° C.) for, e.g., 4 hours. Stable tail mRNA are purified by, e.g., dT purification, reverse phase purification, hydroxyapatite purification, ultrafiltration into water, and sterile filtration. The resulting stable tail-containing mRNAs contain the following structure at the 3′end, starting with the polyA region: A100-UCUAGAAAAAAAAAAAAAAAAAAAA-inverted deoxythymidine (SEQ ID NO:211).

[1325] Modifying oligo to stabilize tail (5′-phosphate-AAAAAAAAAAAAAAAAAAAA-(inverted deoxythymidine)(SEQ ID NO:209)):

[chemical structure]

### Start Codon Region

[1326] The invention also includes a polynucleotide that comprises both a start codon region and a polynucleotide described herein (e.g., a polynucleotide comprising a nucleotide sequence encoding an immune checkpoint inhibitor polypeptide). In some embodiments, the polynucleotides of the present invention can have regions that are analogous to or function like a start codon region.

[1327] In some embodiments, the translation of a polynucleotide can initiate on a codon that is not the start codon AUG. Translation of the polynucleotide can initiate on an alternative start codon such as, but not limited to, ACG, AGG, AAG, CTG/CUG, GTG/GUG, ATA/AUA, ATT/AUU, TTG/UUG (see Touriol et al. Biology of the Cell 95 (2003) 169-178 and Matsuda and Mauro PLoS ONE, 2010 5:11; the contents of each of which are herein incorporated by reference in its entirety).

[1328] As a non-limiting example, the translation of a polynucleotide begins on the alternative start codon ACG. As another non-limiting example, polynucleotide translation begins on the alternative start codon CTG or CUG. As another non-limiting example, the translation of a polynucleotide begins on the alternative start codon GTG or GUG.

[1329] Nucleotides flanking a codon that initiates translation such as, but not limited to, a start codon or an alternative start codon, are known to affect the translation efficiency, the length and/or the structure of the polynucleotide. (See, e.g., Matsuda and Mauro PLoS ONE, 2010 5:11; the contents of which are herein incorporated by reference in its entirety). Masking any of the nucleotides flanking a codon that initiates translation can be used to alter the position of translation initiation, translation efficiency, length and/or structure of a polynucleotide.

[1330] In some embodiments, a masking agent can be used near the start codon or alternative start codon to mask or hide the codon to reduce the probability of translation initiation at the masked start codon or alternative start codon. Non-limiting examples of masking agents include antisense locked nucleic acids (LNA) polynucleotides and exon-junction complexes (EJCs) (See, e.g., Matsuda and Mauro describing masking agents LNA polynucleotides and EJCs (PLoS ONE, 2010 5:11); the contents of which are herein incorporated by reference in its entirety).

[1331] In another embodiment, a masking agent can be used to mask a start codon of a polynucleotide to increase the likelihood that translation will initiate on an alternative start codon. In some embodiments, a masking agent can be used to mask a first start codon or alternative start codon to increase the chance that translation will initiate on a start codon or alternative start codon downstream to the masked start codon or alternative start codon.

[1332] In some embodiments, a start codon or alternative start codon can be located within a perfect complement for a miRNA binding site. The perfect complement of a miRNA binding site can help control the translation, length and/or structure of the polynucleotide similar to a masking agent. As a non-limiting example, the start codon or alternative start codon can be located in the middle of a perfect complement for a miRNA binding site. The start codon or alternative start codon can be located after the first nucleotide, second nucleotide, third nucleotide, fourth nucleotide, fifth nucleotide, sixth nucleotide, seventh nucleotide, eighth nucleotide, ninth nucleotide, tenth nucleotide, eleventh nucleotide, twelfth nucleotide, thirteenth nucleotide, fourteenth nucleotide, fifteenth nucleotide, sixteenth nucleotide, seventeenth nucleotide, eighteenth nucleotide, nineteenth nucleotide, twentieth nucleotide, or twenty-first nucleotide.

[1333] In another embodiment, the start codon of a polynucleotide can be removed from the polynucleotide sequence to have the translation of the polynucleotide begin on a codon that is not the start codon. Translation of the polynucleotide can begin on the codon following the removed start codon or on a downstream start codon or an alternative start codon. In a non-limiting example, the start codon ATG or AUG is removed as the first 3 nucleotides of the polynucleotide sequence to have translation initiate on a downstream start codon or alternative start codon. The polynucleotide sequence where the start codon was removed can further comprise at least one masking agent for the downstream start codon and/or alternative start codons to control or attempt to control the initiation of translation, the length of the polynucleotide and/or the structure of the polynucleotide.

### Stop Codon Region

[1334] The invention also includes a polynucleotide that comprises both a stop codon region and a polynucleotide described herein (e.g., a polynucleotide comprising a nucleotide sequence encoding an ITB6 polypeptide). In some embodiments, the polynucleotides of the present invention can include at least two stop codons before the 3′ untranslated region (UTR). The stop codon can be selected from TGA, TAA and TAG in the case of DNA, or from UGA, UAA and UAG in the case of RNA. In some embodiments, the polynucleotides of the present invention include the stop codon TGA in the case or DNA, or the stop codon UGA in the case of RNA, and one additional stop codon. In a further embodiment the addition stop codon can be TAA or UAA. In another embodiment, the polynucleotides of the present invention include three consecutive stop codons, four stop codons, or more.

### 3′ Stabilizing Region

[1335] In some embodiments, the polynucleotides of the present disclosure (e.g., a polynucleotide comprising a nucleotide sequence encoding an ITB6 polypeptide) further comprise a 3′ stabilizing region. In an embodiment, the polynucleotide comprises: (a) a 5′-UTR (e.g., as described herein); (b) a coding region comprising a stop codon region (e.g., as described herein); (c) a 3′-UTR (e.g., as described herein), and (d) a 3′ stabilizing region. Also disclosed herein are LNP compositions comprising the same.

[1336] In an embodiment, the polynucleotide comprises a 3′ stabilizing region, e.g., a stabilized tail (e.g., as described herein). A polynucleotide containing a 3′-stabilizing region (e.g., a 3′-stabilizing region including an alternative nucleobase, sugar, and/or backbone) may be particularly effective for use in therapeutic compositions, because they may benefit from increased stability, high expression levels.

[1337] In an embodiment, the 3′ stabilizing region comprises a poly A tail, e.g., a poly A tail comprising 80-150, e.g., 120, adenines (SEQ ID NO: 370). In an embodiment, the poly A tail comprises a UCUAG sequence (SEQ ID NO: 270). In an embodiment, the poly A tail comprises about 80-120, e.g., 100, adenines upstream of SEQ ID NO: 270. In an embodiment, the poly A tail comprises about 1-40, e.g., 20, adenines downstream of SEQ ID NO: 270.

[1338] In an embodiment, the 3′ stabilizing region comprises at least one alternative nucleoside. In an embodiment, the alternative nucleoside is an inverted thymidine (idT). In an embodiment, the alternative nucleoside is disposed at the 3′ end of the 3′ stabilizing region.

[1339] In an embodiment, the 3′ stabilizing region comprises a structure of Formula VII:

[chemical structure]

or a salt thereof, wherein each X is independently O or S, and A represents adenine and T represents Thymine.

[1340] In an aspect, disclosed herein is an LNP composition comprising a polynucleotide (e.g., an mRNA) which encodes an ITB6 molecule (e.g., an ITB6 molecule described herein), wherein the polynucleotide comprises: (a) a 5′-UTR (e.g., as described herein); (b) a coding region comprising a stop element (e.g., as described herein); (c) a 3′-UTR (e.g., as described herein) and; (d) a 3′ stabilizing region (e.g., as described herein).

[1341] In an embodiment, the LNP composition comprises: (i) an ionizable lipid (e.g., an amino lipid); (ii) a sterol or other structural lipid; (iii) a non-cationic helper lipid or phospholipid; and (iv) a PEG-lipid.

### Methods of Making Polynucleotides

### In Vitro Transcription/Enzymatic Synthesis

[1342] The present disclosure also provides methods for making a polynucleotide disclosed herein or a complement thereof. In some aspects, a polynucleotide (e.g., an mRNA) disclosed herein encoding an ITB6 molecule can be constructed using in vitro transcription.

[1343] In other aspects, a polynucleotide (e.g., an mRNA) disclosed herein encoding an ITB6 molecule can be constructed by chemical synthesis using an oligonucleotide synthesizer. In other aspects, a polynucleotide (e.g., an mRNA) disclosed herein encoding an ITB6 molecule is made by using a host cell. In certain aspects, a polynucleotide (e.g., an mRNA) disclosed herein encoding an ITB6 molecule is made by one or more combination of the IVT, chemical synthesis, host cell expression, or any other methods known in the art.

[1344] Naturally occurring nucleosides, non-naturally occurring nucleosides, or combinations thereof, can totally or partially naturally replace occurring nucleosides present in the candidate nucleotide sequence and can be incorporated into a sequence-optimized nucleotide sequence (e.g., an mRNA) encoding an ITB6 molecule. The resultant mRNAs can then be examined for their ability to produce protein and/or produce a therapeutic outcome.

[1345] While RNA can be made synthetically using methods well known in the art, in one embodiment an RNA transcript (e.g., mRNA transcript) is synthesized by contacting a DNA template with a RNA polymerase (e.g., a T7 RNA polymerase or a T7 RNA polymerase variant) under conditions that result in the production of RNA transcript.

[1346] In some aspects, the present disclosure provides methods of performing an IVT (in vitro transcription) reaction, comprising contacting a DNA template with the RNA polymerase (e.g., a T7 RNA polymerase, such as a T7 RNA polymerase variant) in the presence of nucleoside triphosphates and buffer under conditions that result in the production of RNA transcripts.

[1347] Other aspects of the present disclosure provide capping methods, e.g., co-transcriptional capping methods or other methods known in the art. In one embodiment, a capping method comprises reacting a polynucleotide template with a T7 RNA polymerase variant, nucleoside triphosphates, and a cap analog under in vitro transcription reaction conditions to produce RNA transcript.

[1348] IVT conditions typically require a purified linear DNA template containing a promoter, nucleoside triphosphates, a buffer system that includes dithiothreitol (DTT) and magnesium ions, and a RNA polymerase. The exact conditions used in the transcription reaction depend on the amount of RNA needed for a specific application. Typical IVT reactions are performed by incubating a DNA template with a RNA polymerase and nucleoside triphosphates, including GTP, ATP, CTP, and UTP (or nucleotide analogs) in a transcription buffer. A RNA transcript having a 5′ terminal guanosine triphosphate is produced from this reaction.

[1349] A deoxyribonucleic acid (DNA) is simply a nucleic acid template for RNA polymerase. A DNA template may include a polynucleotide encoding an ITB6 polypeptide of interest (e.g., an antigenic polypeptide). A DNA template, in some embodiments, includes a RNA polymerase promoter (e.g., a T7 RNA polymerase promoter) located 5′ from and operably linked to polynucleotide encoding an ITB6 polypeptide of interest. A DNA template may also include a nucleotide sequence encoding a polyadenylation (polyA) tail located at the 3′ end of the gene of interest.

[1350] Polypeptides of interest include, but are not limited to, biologics, antibodies, antigens (vaccines), and therapeutic proteins. The term “protein” encompasses peptides.

[1351] A RNA transcript, in some embodiments, is the product of an IVT reaction and, as will be understood by one of ordinary skill in the art, the DNA template for making an RNA molecule is known based on base complementarity. A RNA transcript, in some embodiments, is a messenger RNA (mRNA) that includes a nucleotide sequence encoding a polypeptide of interest linked to a polyA tail. In some embodiments, the mRNA is modified mRNA (mmRNA), which includes at least one modified nucleotide.

[1352] A nucleotide includes a nitrogenous base, a five-carbon sugar (ribose or deoxyribose), and at least one phosphate group. Nucleotides include nucleoside monophosphates, nucleoside diphosphates, and nucleoside triphosphates. A nucleoside monophosphate (NMP) includes a nucleobase linked to a ribose and a single phosphate; a nucleoside diphosphate (NDP) includes a nucleobase linked to a ribose and two phosphates; and a nucleoside triphosphate (NTP) includes a nucleobase linked to a ribose and three phosphates. Nucleotide analogs are compounds that have the general structure of a nucleotide or are structurally similar to a nucleotide. Nucleotide analogs, for example, include an analog of the nucleobase, an analog of the sugar and/or an analog of the phosphate group(s) of a nucleotide.

[1353] A nucleoside includes a nitrogenous base and a 5-carbon sugar. Thus, a nucleoside plus a phosphate group yields a nucleotide. Nucleoside analogs are compounds that have the general structure of a nucleoside or are structurally similar to a nucleoside. Nucleoside analogs, for example, include an analog of the nucleobase and/or an analog of the sugar of a nucleoside.

[1354] It should be understood that the term “nucleotide” includes naturally-occurring nucleotides, synthetic nucleotides and modified nucleotides, unless indicated otherwise. Examples of naturally-occurring nucleotides used for the production of RNA, e.g., in an IVT reaction, as provided herein include adenosine triphosphate (ATP), guanosine triphosphate (GTP), cytidine triphosphate (CTP), uridine triphosphate (UTP), and 5-methyluridine triphosphate (m5UTP). In some embodiments, adenosine diphosphate (ADP), guanosine diphosphate (GDP), cytidine diphosphate (CDP), and/or uridine diphosphate (UDP) are used.

[1355] Examples of nucleotide analogs include, but are not limited to, antiviral nucleotide analogs, phosphate analogs (soluble or immobilized, hydrolyzable or non-hydrolyzable), dinucleotide, trinucleotide, tetranucleotide, e.g., a cap analog, or a precursor/substrate for enzymatic capping (vaccinia or ligase), a nucleotide labeled with a functional group to facilitate ligation/conjugation of cap or 5′ moiety (IRES), a nucleotide labeled with a 5′ PO4 to facilitate ligation of cap or 5′ moiety, or a nucleotide labeled with a functional group/protecting group that can be chemically or enzymatically cleaved. Examples of antiviral nucleotide/nucleoside analogs include, but are not limited, to Ganciclovir, Entecavir, Telbivudine, Vidarabine and Cidofovir.

[1356] Modified nucleotides may include modified nucleobases. For example, a RNA transcript (e.g., mRNA transcript) of the present disclosure may include a modified nucleobase selected from pseudouridine (ψ), 1-methylpseudouridine (m1ψ), 1-ethylpseudouridine, 2-thiouridine, 4′-thiouridine, 2-thio-1-methyl-1-deaza-pseudouridine, 2-thio-1-methyl-pseudouridine, 2-thio-5-aza-uridine, 2-thio-dihydropseudouridine, 2-thio-dihydrouridine, 2-thio-pseudouridine, 4-methoxy-2-thio-pseudouridine, 4-methoxy-pseudouridine, 4-thio-1-methyl-pseudouridine, 4-thio-pseudouridine, 5-aza-uridine, dihydropseudouridine, 5-methyluridine, 5-methoxyuridine (mo5U) and 2′-O-methyl uridine. In some embodiments, a RNA transcript (e.g., mRNA transcript) includes a combination of at least two (e.g., 2, 3, 4, or more) of the foregoing modified nucleobases.

[1357] The nucleoside triphosphates (NTPs) as provided herein may comprise unmodified or modified ATP, modified or unmodified UTP, modified or unmodified GTP, and/or modified or unmodified CTP. In some embodiments, NTPs of an IVT reaction comprise unmodified ATP. In some embodiments, NTPs of an IVT reaction comprise modified ATP. In some embodiments, NTPs of an IVT reaction comprise unmodified UTP. In some embodiments, NTPs of an IVT reaction comprise modified UTP. In some embodiments, NTPs of an IVT reaction comprise unmodified GTP. In some embodiments, NTPs of an IVT reaction comprise modified GTP. In some embodiments, NTPs of an IVT reaction comprise unmodified CTP. In some embodiments, NTPs of an IVT reaction comprise modified CTP.

[1358] The concentration of nucleoside triphosphates and cap analog present in an IVT reaction may vary. In some embodiments, NTPs and cap analog are present in the reaction at equimolar concentrations. In some embodiments, the molar ratio of cap analog (e.g., trinucleotide cap) to nucleoside triphosphates in the reaction is greater than 1:1. For example, the molar ratio of cap analog to nucleoside triphosphates in the reaction may be 2:1, 3:1, 4:1, 5:1, 6:1, 7:1, 8:1, 9:1, 10:1, 15:1, 20:1, 25:1, 50:1, or 100:1. In some embodiments, the molar ratio of cap analog (e.g., trinucleotide cap) to nucleoside triphosphates in the reaction is less than 1:1. For example, the molar ratio of cap analog (e.g., trinucleotide cap) to nucleoside triphosphates in the reaction may be 1:2, 1:3, 1:4, 1:5, 1:6, 1:7, 1:8, 1:9, 1:10, 1:15, 1:20, 1:25, 1:50, or 1:100.

[1359] The composition of NTPs in an IVT reaction may also vary. For example, ATP may be used in excess of GTP, CTP and UTP. As a non-limiting example, an IVT reaction may include 7.5 millimolar GTP, 7.5 millimolar CTP, 7.5 millimolar UTP, and 3.75 millimolar ATP. The same IVT reaction may include 3.75 millimolar cap analog (e.g., trinucleotide cap). In some embodiments, the molar ratio of G:C:U:A:cap is 1:1:1:0.5:0.5. In some embodiments, the molar ratio of G:C:U:A:cap is 1:1:0.5:1:0.5. In some embodiments, the molar ratio of G:C:U:A:cap is 1:0.5:1:1:0.5. In some embodiments, the molar ratio of G:C:U:A:cap is 0.5:1:1:1:0.5.

[1360] In some embodiments, a RNA transcript (e.g., mRNA transcript) includes a modified nucleobase selected from pseudouridine (ψ), 1-methylpseudouridine (m1ψ), 5-methoxyuridine (mo⁵U), 5-methylcytidine (m⁵C), α-thio-guanosine and α-thio-adenosine. In some embodiments, a RNA transcript (e.g., mRNA transcript) includes a combination of at least two (e.g., 2, 3, 4 or more) of the foregoing modified nucleobases.

[1361] In some embodiments, a RNA transcript (e.g., mRNA transcript) includes pseudouridine (ψ). In some embodiments, a RNA transcript (e.g., mRNA transcript) includes 1-methylpseudouridine (m1ψ). In some embodiments, a RNA transcript (e.g., mRNA transcript) includes 5-methoxyuridine (mo⁵U). In some embodiments, a RNA transcript (e.g., mRNA transcript) includes 5-methylcytidine (m⁵C). In some embodiments, a RNA transcript (e.g., mRNA transcript) includes α-thio-guanosine. In some embodiments, a RNA transcript (e.g., mRNA transcript) includes α-thio-adenosine.

[1362] In some embodiments, the polynucleotide (e.g., RNA polynucleotide, such as mRNA polynucleotide) is uniformly modified (e.g., fully modified, modified throughout the entire sequence) for a particular modification. For example, a polynucleotide can be uniformly modified with 1-methylpseudouridine (m¹ψ), meaning that all uridine residues in the mRNA sequence are replaced with 1-methylpseudouridine (m¹ψ). Similarly, a polynucleotide can be uniformly modified for any type of nucleoside residue present in the sequence by replacement with a modified residue such as any of those set forth above. Alternatively, the polynucleotide (e.g., RNA polynucleotide, such as mRNA polynucleotide) may not be uniformly modified (e.g., partially modified, part of the sequence is modified). Each possibility represents a separate embodiment of the present invention.

[1363] In some embodiments, the buffer system contains tris. The concentration of tris used in an IVT reaction, for example, may be at least 10 mM, at least 20 mM, at least 30 mM, at least 40 mM, at least 50 mM, at least 60 mM, at least 70 mM, at least 80 mM, at least 90 mM, at least 100 mM or at least 110 mM phosphate. In some embodiments, the concentration of phosphate is 20-60 mM or 10-100 mM.

[1364] In some embodiments, the buffer system contains dithiothreitol (DTT). The concentration of DTT used in an IVT reaction, for example, may be at least 1 mM, at least 5 mM, or at least 50 mM. In some embodiments, the concentration of DTT used in an IVT reaction is 1-50 mM or 5-50 mM. In some embodiments, the concentration of DTT used in an IVT reaction is 5 mM.

[1365] In some embodiments, the buffer system contains magnesium. In some embodiments, the molar ratio of NTP to magnesium ions (Mg²⁺; e.g., MgCl₂) present in an IVT reaction is 1:1 to 1:5. For example, the molar ratio of NTP to magnesium ions may be 1:1, 1:2, 1:3, 1:4 or 1:5.

[1366] In some embodiments, the molar ratio of NTP plus cap analog (e.g., trinucleotide cap, such as GAG) to magnesium ions (Mg²⁺; e.g., MgCl₂) present in an IVT reaction is 1:1 to 1:5. For example, the molar ratio of NTP+trinucleotide cap (e.g., GAG) to magnesium ions may be 1:1, 1:2, 1:3, 1:4, or 1:5.

[1367] In some embodiments, the buffer system contains Tris-HCl, spermidine (e.g., at a concentration of 1-30 mM), TRITON® X-100 (polyethylene glycol p-(1,1,3,3-tetramethylbutyl)-phenyl ether) and/or polyethylene glycol (PEG).

[1368] The addition of nucleoside triphosphates (NTPs) to the 3′ end of a growing RNA strand is catalyzed by a polymerase, such as T7 RNA polymerase, for example, any one or more of the T7 RNA polymerase variants (e.g., G47A) of the present disclosure. In some embodiments, the RNA polymerase (e.g., T7 RNA polymerase variant) is present in a reaction (e.g., an IVT reaction) at a concentration of 0.01 mg/ml to 1 mg/ml. For example, the RNA polymerase may be present in a reaction at a concentration of 0.01 mg/mL, 0.05 mg/ml, 0.1 mg/ml, 0.5 mg/ml, or 1.0 mg/ml.

[1369] In some embodiments, the polynucleotide of the present disclosure is an IVT polynucleotide. Traditionally, the basic components of an mRNA molecule include at least a coding region, a 5′UTR, a 3′UTR, a 5′ cap and a poly-A tail. The IVT polynucleotides of the present disclosure can function as mRNA but are distinguished from wild-type mRNA in their functional and/or structural design features which serve, e.g., to overcome existing problems of effective polypeptide production using nucleic-acid based therapeutics.

[1370] The primary construct of an IVT polynucleotide comprises a first region of linked nucleotides that is flanked by a first flanking region and a second flaking region. This first region can include, but is not limited to, the encoded ITB6 polypeptide. The first flanking region can include a sequence of linked nucleosides which function as a 5′ untranslated region (UTR) such as the 5′ UTR of any of the nucleic acids encoding the native 5′ UTR of the polypeptide or a non-native 5′UTR such as, but not limited to, a heterologous 5′ UTR or a synthetic 5′ UTR. The IVT encoding an ITB6 polypeptide therapeutic payload or prophylactic payload can comprise at its 5 terminus a signal sequence region encoding one or more signal sequences. The flanking region can comprise a region of linked nucleotides comprising one or more complete or incomplete 5′ UTRs sequences. The flanking region can also comprise a 5′ terminal cap. The second flanking region can comprise a region of linked nucleotides comprising one or more complete or incomplete 3′ UTRs which can encode the native 3′ UTR of an ITB6 polypeptide therapeutic payload or prophylactic payload, or a non-native 3′ UTR such as, but not limited to, a heterologous 3′ UTR or a synthetic 3′ UTR. The flanking region can also comprise a 3′ tailing sequence. The 3′ tailing sequence can be, but is not limited to, a polyA tail, a polyA-G quartet and/or a stem loop sequence.

[1371] Exemplary methods of making a polynucleotide disclosed herein include: in vitro transcription enzymatic synthesis and chemical synthesis which are disclosed in International PCT application WO 2017/201325, filed on 18 May 2017, the entire contents of which are hereby incorporated by reference.

### Chemical Synthesis

[1372] Standard methods can be applied to synthesize an isolated polynucleotide sequence encoding an isolated polypeptide of interest, such as a polynucleotide of the invention (e.g., a polynucleotide comprising a nucleotide sequence encoding an ITB6 polypeptide). For example, a single DNA or RNA oligomer containing a codon-optimized nucleotide sequence coding for the particular isolated polypeptide can be synthesized. In other aspects, several small oligonucleotides coding for portions of the desired polypeptide can be synthesized and then ligated. In some aspects, the individual oligonucleotides typically contain 5′ or 3′ overhangs for complementary assembly.

[1373] A polynucleotide disclosed herein (e.g., a RNA, e.g., an mRNA) can be chemically synthesized using chemical synthesis methods and potential nucleobase substitutions known in the art. See, for example, International Publication Nos. WO2014093924, WO2013052523; WO2013039857, WO2012135805, WO2013151671; U.S. Publ. No. US20130115272; or U.S. Pat. No. 8,999,380 or 8,710,200, all of which are herein incorporated by reference in their entireties.

### Purification

[1374] In other aspects, a polynucleotide (e.g., an mRNA) disclosed herein encoding an ITB6 molecule can be purified. Purification of the polynucleotides (e.g., mRNA) encoding an ITB6 molecule described herein can include, but is not limited to, polynucleotide clean-up, quality assurance and quality control. Clean-up can be performed by methods known in the arts such as, but not limited to, AGENCOURT® beads (Beckman Coulter Genomics, Danvers, MA), poly-T beads, LNA™ oligo-T capture probes (EXIQON® Inc, Vedbaek, Denmark) or HPLC based purification methods such as, but not limited to, strong anion exchange HPLC, weak anion exchange HPLC, reverse phase HPLC (RP-HPLC), and hydrophobic interaction HPLC (HIC-HPLC). The term “purified” when used in relation to a polynucleotide such as a “purified polynucleotide” refers to one that is separated from at least one contaminant. As used herein, a “contaminant” is any substance which makes another unfit, impure or inferior. Thus, a purified polynucleotide (e.g., DNA and RNA) is present in a form or setting different from that in which it is found in nature, or a form or setting different from that which existed prior to subjecting it to a treatment or purification method.

[1375] In some embodiments, purification of a polynucleotide (e.g., mRNA) encoding an ITB6 molecule of the disclosure removes impurities that can reduce or remove an unwanted immune response, e.g., reducing cytokine activity.

[1376] In some embodiments, the polynucleotide (e.g., mRNA) encoding an ITB6 molecule of the disclosure is purified prior to administration using column chromatography (e.g., strong anion exchange HPLC, weak anion exchange HPLC, reverse phase HPLC (RP-HPLC), and hydrophobic interaction HPLC (HIC-HPLC), or (LCMS)). In some embodiments, a column chromatography (e.g., strong anion exchange HPLC, weak anion exchange HPLC, reverse phase HPLC (RP-HPLC), and hydrophobic interaction HPLC (HIC-HPLC), or (LCMS)) purified polynucleotide, which encodes an ITB6 molecule disclosed herein increases expression of the an ITB6 molecule compared to polynucleotides encoding the ITB6 molecule purified by a different purification method.

[1377] In some embodiments, a column chromatography (e.g., strong anion exchange HPLC, weak anion exchange HPLC, reverse phase HPLC (RP-HPLC), and hydrophobic interaction HPLC (HIC-HPLC), or (LCMS)) purified polynucleotide encodes an ITB6 molecule. In some embodiments, the purified polynucleotide encodes a human ITB6 molecule.

[1378] In some embodiments, the purified polynucleotide is at least about 80% pure, at least about 85% pure, at least about 90% pure, at least about 95% pure, at least about 96% pure, at least about 97% pure, at least about 98% pure, at least about 99% pure, or about 100% pure.

[1379] A quality assurance and/or quality control check can be conducted using methods such as, but not limited to, gel electrophoresis, UV absorbance, or analytical HPLC.

[1380] In another embodiment, the polynucleotides can be sequenced by methods including, but not limited to reverse-transcriptase-PCR.

### Chemical Modifications of Polynucleotides

[1381] The present disclosure provides for modified nucleosides and nucleotides of a nucleic acid (e.g., RNA nucleic acids, such as mRNA nucleic acids). A “nucleoside” refers to a compound containing a sugar molecule (e.g., a pentose or ribose) or a derivative thereof in combination with an organic base (e.g., a purine or pyrimidine) or a derivative thereof (also referred to herein as “nucleobase”). A “nucleotide” refers to a nucleoside, including a phosphate group. Modified nucleotides may by synthesized by any useful method, such as, for example, chemically, enzymatically, or recombinantly, to include one or more modified or non-natural nucleosides. Nucleic acids can comprise a region or regions of linked nucleosides. Such regions may have variable backbone linkages. The linkages can be standard phosphodiester linkages, in which case the nucleic acids would comprise regions of nucleotides.

[1382] Modified nucleotide base pairing encompasses not only the standard adenosine-thymine, adenosine-uracil, or guanosine-cytosine base pairs, but also base pairs formed between nucleotides and/or modified nucleotides comprising non-standard or modified bases, wherein the arrangement of hydrogen bond donors and hydrogen bond acceptors permits hydrogen bonding between a non-standard base and a standard base or between two complementary non-standard base structures, such as, for example, in those nucleic acids having at least one chemical modification. One example of such non-standard base pairing is the base pairing between the modified nucleotide inosine and adenine, cytosine or uracil. Any combination of base/sugar or linker may be incorporated into nucleic acids of the present disclosure.

[1383] In some embodiments, modified nucleobases in nucleic acids (e.g., RNA nucleic acids, such as mRNA nucleic acids) comprise N1-methyl-pseudouridine (m1ψ), 1-ethyl-pseudouridine (e1ψ), 5-methoxy-uridine (mo5U), 5-methyl-cytidine (m5C), and/or pseudouridine (ψ). In some embodiments, modified nucleobases in nucleic acids (e.g., RNA nucleic acids, such as mRNA nucleic acids) comprise 5-methoxymethyl uridine, 5-methylthio uridine, 1-methoxymethyl pseudouridine, 5-methyl cytidine, and/or 5-methoxy cytidine. In some embodiments, the polyribonucleotide includes a combination of at least two (e.g., 2, 3, 4 or more) of any of the aforementioned modified nucleobases, including but not limited to chemical modifications.

[1384] In some embodiments, a RNA nucleic acid of the disclosure comprises N1-methyl-pseudouridine (m1ψ) substitutions at one or more or all uridine positions of the nucleic acid.

[1385] In some embodiments, a RNA nucleic acid of the disclosure comprises N1-methyl-pseudouridine (m1ψ) substitutions at one or more or all uridine positions of the nucleic acid and 5-methyl cytidine substitutions at one or more or all cytidine positions of the nucleic acid.

[1386] In some embodiments, a RNA nucleic acid of the disclosure comprises pseudouridine (ψ) substitutions at one or more or all uridine positions of the nucleic acid.

[1387] In some embodiments, a RNA nucleic acid of the disclosure comprises pseudouridine (ψ) substitutions at one or more or all uridine positions of the nucleic acid and 5-methyl cytidine substitutions at one or more or all cytidine positions of the nucleic acid.

[1388] In some embodiments, a RNA nucleic acid of the disclosure comprises uridine at one or more or all uridine positions of the nucleic acid.

[1389] In some embodiments, nucleic acids (e.g., RNA nucleic acids, such as mRNA nucleic acids) are uniformly modified (e.g., fully modified, modified throughout the entire sequence) for a particular modification. For example, a nucleic acid can be uniformly modified with N1-methyl-pseudouridine, meaning that all uridine residues in the mRNA sequence are replaced with N1-methyl-pseudouridine. Similarly, a nucleic acid can be uniformly modified for any type of nucleoside residue present in the sequence by replacement with a modified residue such as those set forth above.

[1390] The nucleic acids of the present disclosure may be partially or fully modified along the entire length of the molecule. For example, one or more or all or a given type of nucleotide (e.g., purine or pyrimidine, or any one or more or all of A, G, U, C) may be uniformly modified in a nucleic acid of the disclosure, or in a predetermined sequence region thereof (e.g., in the mRNA including or excluding the polyA tail). In some embodiments, all nucleotides X in a nucleic acid of the present disclosure (or in a sequence region thereof) are modified nucleotides, wherein X may be any one of nucleotides A, G, U, C, or any one of the combinations A+G, A+U, A+C, G+U, G+C, U+C, A+G+U, A+G+C, G+U+C or A+G+C.

[1391] The nucleic acid may contain from about 1% to about 100% modified nucleotides (either in relation to overall nucleotide content, or in relation to one or more types of nucleotide, i.e., any one or more of A, G, U or C) or any intervening percentage (e.g., from 1% to 20%, from 1% to 25%, from 1% to 50%, from 1% to 60%, from 1% to 70%, from 1% to 80%, from 1% to 90%, from 1% to 95%, from 10% to 20%, from 10% to 25%, from 10% to 50%, from 10% to 60%, from 10% to 70%, from 10% to 80%, from 10% to 90%, from 10% to 95%, from 10% to 100%, from 20% to 25%, from 20% to 50%, from 20% to 60%, from 20% to 70%, from 20% to 80%, from 20% to 90%, from 20% to 95%, from 20% to 100%, from 50% to 60%, from 50% to 70%, from 50% to 80%, from 50% to 90%, from 50% to 95%, from 50% to 100%, from 70% to 80%, from 70% to 90%, from 70% to 95%, from 70% to 100%, from 80% to 90%, from 80% to 95%, from 80% to 100%, from 90% to 95%, from 90% to 100%, and from 95% to 100%). It will be understood that any remaining percentage is accounted for by the presence of unmodified A, G, U, or C.

[1392] The nucleic acids may contain at a minimum 1% and at maximum 100% modified nucleotides, or any intervening percentage, such as at least 5% modified nucleotides, at least 10% modified nucleotides, at least 25% modified nucleotides, at least 50% modified nucleotides, at least 80% modified nucleotides, or at least 90% modified nucleotides. For example, the nucleic acids may contain a modified pyrimidine such as a modified uracil or cytosine. In some embodiments, at least 5%, at least 10%, at least 25%, at least 50%, at least 80%, at least 90% or 100% of the uracil in the nucleic acid is replaced with a modified uracil (e.g., a 5-substituted uracil). The modified uracil can be replaced by a compound having a single unique structure, or can be replaced by a plurality of compounds having different structures (e.g., 2, 3, 4 or more unique structures). In some embodiments, at least 5%, at least 10%, at least 25%, at least 50%, at least 80%, at least 90% or 100% of the cytosine in the nucleic acid is replaced with a modified cytosine (e.g., a 5-substituted cytosine). The modified cytosine can be replaced by a compound having a single unique structure, or can be replaced by a plurality of compounds having different structures (e.g., 2, 3, 4 or more unique structures).

### Quantification of Expressed Polynucleotides Encoding ITB6

[1393] In some embodiments, the polynucleotides of the present invention (e.g., a polynucleotide comprising a nucleotide sequence encoding an ITB6 polypeptide), their expression products, as well as degradation products and metabolites can be quantified according to methods known in the art.

[1394] In some embodiments, the polynucleotides of the present invention can be quantified in exosomes or when derived from one or more bodily fluid. As used herein “bodily fluids” include peripheral blood, serum, plasma, ascites, urine, cerebrospinal fluid (CSF), sputum, saliva, bone marrow, synovial fluid, aqueous humor, amniotic fluid, cerumen, breast milk, broncheoalveolar lavage fluid, semen, prostatic fluid, cowper's fluid or pre-ejaculatory fluid, sweat, fecal matter, hair, tears, cyst fluid, pleural and peritoneal fluid, pericardial fluid, lymph, chyme, chyle, bile, interstitial fluid, menses, pus, sebum, vomit, vaginal secretions, mucosal secretion, stool water, pancreatic juice, lavage fluids from sinus cavities, bronchopulmonary aspirates, blastocyl cavity fluid, and umbilical cord blood. Alternatively, exosomes can be retrieved from an organ selected from the group consisting of lung, heart, pancreas, stomach, intestine, bladder, kidney, ovary, testis, skin, colon, breast, prostate, brain, esophagus, liver, and placenta.

[1395] In the exosome quantification method, a sample of not more than 2 mL is obtained from the subject and the exosomes isolated by size exclusion chromatography, density gradient centrifugation, differential centrifugation, nanomembrane ultrafiltration, immunoabsorbent capture, affinity purification, microfluidic separation, or combinations thereof. In the analysis, the level or concentration of a polynucleotide can be an expression level, presence, absence, truncation or alteration of the administered construct. It is advantageous to correlate the level with one or more clinical phenotypes or with an assay for a human disease biomarker.

[1396] The assay can be performed using construct specific probes, cytometry, qRT-PCR, real-time PCR, PCR, flow cytometry, electrophoresis, mass spectrometry, or combinations thereof while the exosomes can be isolated using immunohistochemical methods such as enzyme linked immunosorbent assay (ELISA) methods. Exosomes can also be isolated by size exclusion chromatography, density gradient centrifugation, differential centrifugation, nanomembrane ultrafiltration, immunoabsorbent capture, affinity purification, microfluidic separation, or combinations thereof.

[1397] These methods afford the investigator the ability to monitor, in real time, the level of polynucleotides remaining or delivered. This is possible because the polynucleotides of the present invention differ from the endogenous forms due to the structural or chemical modifications.

[1398] In some embodiments, the polynucleotide can be quantified using methods such as, but not limited to, ultraviolet visible spectroscopy (UV/Vis). A non-limiting example of a UV/Vis spectrometer is a NANODROP® spectrometer (ThermoFisher, Waltham, MA). The quantified polynucleotide can be analyzed in order to determine if the polynucleotide can be of proper size, check that no degradation of the polynucleotide has occurred. Degradation of the polynucleotide can be checked by methods such as, but not limited to, agarose gel electrophoresis, HPLC based purification methods such as, but not limited to, strong anion exchange HPLC, weak anion exchange HPLC, reverse phase HPLC (RP-HPLC), and hydrophobic interaction HPLC (HIC-HPLC), liquid chromatography-mass spectrometry (LCMS), capillary electrophoresis (CE) and capillary gel electrophoresis (CGE).

### Pharmaceutical Compositions

[1399] The present disclosure provides pharmaceutical formulations comprising any of the LNP compositions disclosed herein, e.g., an LNP composition comprising a polynucleotide comprising an mRNA comprising an ITB6 molecule.

[1400] In some embodiments, the composition or formulation can contain a polynucleotide comprising a sequence optimized nucleic acid sequence disclosed herein which encodes an ITB6 polypeptide. In some embodiments, the composition or formulation can contain a polynucleotide (e.g., a RNA, e.g., an mRNA) comprising a polynucleotide (e.g., an ORF) having significant sequence identity to a sequence optimized nucleic acid sequence disclosed herein which encodes an ITB6 polypeptide. In some embodiments, the polynucleotide further comprises a miRNA binding site, e.g., a miRNA binding site that binds miR-126, miR-142, miR-144, miR-146, miR-150, miR-155, miR-16, miR-21, miR-223, miR-24, miR-27 and miR-26a.

[1401] In some embodiments of the disclosure, the polynucleotides are formulated in compositions and complexes in combination with one or more pharmaceutically acceptable excipients. Pharmaceutical compositions can optionally comprise one or more additional active substances, e.g. therapeutically and/or prophylactically active substances. Pharmaceutical compositions of the present disclosure can be sterile and/or pyrogen-free. General considerations in the formulation and/or manufacture of pharmaceutical agents can be found, for example, in Remington: The Science and Practice of Pharmacy 21st ed., Lippincott Williams & Wilkins, 2005.

[1402] In some embodiments, compositions are administered to humans, human patients or subjects. For the purposes of the present disclosure, the phrase “active ingredient” generally refers to polynucleotides to be delivered as described herein.

[1403] Although the descriptions of pharmaceutical compositions provided herein are principally directed to pharmaceutical compositions which are suitable for administration to humans, it will be understood by the skilled artisan that such compositions are generally suitable for administration to any other animal, e.g., to non-human animals, e.g. non-human mammals. Modification of pharmaceutical compositions suitable for administration to humans in order to render the compositions suitable for administration to various animals is well understood, and the ordinarily skilled veterinary pharmacologist can design and/or perform such modification with merely ordinary, if any, experimentation. Subjects to which administration of the pharmaceutical compositions is contemplated include, but are not limited to, humans and/or other primates; mammals.

[1404] In some embodiments, the polynucleotide of the present disclosure is formulated for subcutaneous, intravenous, intraperitoneal, intramuscular, intra-articular, intra-synovial, intrasternal, intrathecal, intrahepatic, intralesional, intracranial, intraventricular, oral, inhalation spray, topical, rectal, nasal, buccal, vaginal, or implanted reservoir intramuscular, subcutaneous, or intradermal delivery. In other embodiments, the polynucleotide is formulated for subcutaneous or intravenous delivery.

[1405] Formulations of the pharmaceutical compositions described herein can be prepared by any method known or hereafter developed in the art of pharmacology. In general, such preparatory methods include the step of bringing the active ingredient into association with an excipient and/or one or more other accessory ingredients, and then, if necessary and/or desirable, dividing, shaping and/or packaging the product into a desired single- or multi-dose unit.

[1406] Relative amounts of the active ingredient, the pharmaceutically acceptable excipient, and/or any additional ingredients in a pharmaceutical composition in accordance with the disclosure will vary, depending upon the identity, size, and/or condition of the subject treated and further depending upon the route by which the composition is to be administered. By way of example, the composition can comprise between 0.1% and 100%, e.g., between 0.5% and 50%, between 1% and 30%, between 5% and 80%, or at least 80% (w/w) active ingredient.

### Formulations

[1407] The polynucleotide comprising an mRNA encoding an ITB6 molecule, of the disclosure can be formulated using one or more excipients.

[1408] The present invention provides pharmaceutical formulations that comprise a polynucleotide described herein (e.g., a polynucleotide comprising a nucleotide sequence encoding an ITB6 polypeptide). The polynucleotides described herein can be formulated using one or more excipients to: (1) increase stability; (2) increase cell transfection; (3) permit the sustained or delayed release (e.g., from a depot formulation of the polynucleotide); (4) alter the biodistribution (e.g., target the polynucleotide to specific tissues or cell types); (5) increase the translation of encoded protein in vivo; and/or (6) alter the release profile of encoded protein in vivo. In some embodiments, the pharmaceutical formulation further comprises a delivery agent comprising, e.g., a compound having the Formula (I); or a compound having the Formula (III), (IV), (V), or (VI), or any combination thereof. In some embodiments, the delivery agent comprises an ionizable amino lipid, a helper lipid (e.g., DSPC), a sterol (e.g., Cholesterol), and a PEG lipid (e.g., PEG-DMG), e.g., with a mole ratio in the range of about (i) 40-50 mol % ionizable amino lipid, optionally 45-50 mol % ionizable amino lipid, for example, 45-46 mol %, 46-47 mol %, 47-48 mol %, 48-49 mol %, or 49-50 mol % for example about 45 mol %, 45.5 mol %, 46 mol %, 46.5 mol %, 47 mol %, 47.5 mol %, 48 mol %, 48.5 mol %, 49 mol %, or 49.5 mol %; (ii) 30-45 mol % sterol (e.g., cholesterol), optionally 35-42 mol % sterol, for example, 30-31 mol %, 31-32 mol %, 32-33 mol %, 33-34 mol %, 35-35 mol %, 35-36 mol %, 36-37 mol %, 37-38 mol %, 38-39 mol %, or 39-40 mol %, or 40-42 mol % sterol; (iii) 5-15 mol % helper lipid (e.g., DSPC), optionally 10-15 mol % helper lipid, for example, 5-6 mol %, 6-7 mol %, 7-8 mol %, 8-9 mol %, 9-10 mol %, 10-11 mol %, 11-12 mol %, 12-13 mol %, 13-14 mol %, or 14-15 mol % helper lipid; and (iv) 1-5% PEG lipid, optionally 1-5 mol % PEG lipid, for example 1.5 to 2.5 mol %, 1-2 mol %, 2-3 mol %, 3-4 mol %, or 4-5 mol % PEG lipid.

[1409] A pharmaceutically acceptable excipient, as used herein, includes, but are not limited to, any and all solvents, dispersion media, or other liquid vehicles, dispersion or suspension aids, diluents, granulating and/or dispersing agents, surface active agents, isotonic agents, thickening or emulsifying agents, preservatives, binders, lubricants or oil, coloring, sweetening or flavoring agents, stabilizers, antioxidants, antimicrobial or antifungal agents, osmolality adjusting agents, pH adjusting agents, buffers, chelants, cyoprotectants, and/or bulking agents, as suited to the particular dosage form desired. Various excipients for formulating pharmaceutical compositions and techniques for preparing the composition are known in the art (see Remington: The Science and Practice of Pharmacy, 21st Edition, A. R. Gennaro (Lippincott, Williams & Wilkins, Baltimore, MD, 2006; incorporated herein by reference in its entirety).

[1410] Exemplary diluents include, but are not limited to, calcium or sodium carbonate, calcium phosphate, calcium hydrogen phosphate, sodium phosphate, lactose, sucrose, cellulose, microcrystalline cellulose, kaolin, mannitol, sorbitol, etc., and/or combinations thereof.

[1411] Exemplary surface active agents and/or emulsifiers include, but are not limited to, natural emulsifiers (e.g., acacia, agar, alginic acid, sodium alginate, tragacanth, chondrux, cholesterol, xanthan, pectin, gelatin, egg yolk, casein, wool fat, cholesterol, wax, and lecithin), sorbitan fatty acid esters (e.g., polyoxyethylene sorbitan monooleate [TWEEN®80], sorbitan monopalmitate [SPAN®40], glyceryl monooleate, polyoxyethylene esters, polyethylene glycol fatty acid esters (e.g., CREMOPHOR®), polyoxyethylene ethers (e.g., polyoxyethylene lauryl ether [BRIJ®30]), PLUORINC®F 68, POLOXAMER®188, etc. and/or combinations thereof.

[1412] Exemplary binding agents include, but are not limited to, starch, gelatin, sugars (e.g., sucrose, glucose, dextrose, dextrin, molasses, lactose, lactitol, mannitol), amino acids (e.g., glycine), natural and synthetic gums (e.g., acacia, sodium alginate), ethylcellulose, hydroxyethylcellulose, hydroxypropyl methylcellulose, etc., and combinations thereof.

[1413] Oxidation is a potential degradation pathway for mRNA, especially for liquid mRNA Formulations. In order to prevent oxidation, antioxidants can be added to the Formulations. Exemplary antioxidants include, but are not limited to, alpha tocopherol, ascorbic acid, ascorbyl palmitate, benzyl alcohol, butylated hydroxyanisole, m-cresol, methionine, butylated hydroxytoluene, monothioglycerol, sodium or potassium metabisulfite, propionic acid, propyl gallate, sodium ascorbate, etc., and combinations thereof.

[1414] Exemplary chelating agents include, but are not limited to, ethylenediaminetetraacetic acid (EDTA), citric acid monohydrate, disodium edetate, fumaric acid, malic acid, phosphoric acid, sodium edetate, tartaric acid, trisodium edetate, etc., and combinations thereof.

[1415] Exemplary antimicrobial or antifungal agents include, but are not limited to, benzalkonium chloride, benzethonium chloride, methyl paraben, ethyl paraben, propyl paraben, butyl paraben, benzoic acid, hydroxybenzoic acid, potassium or sodium benzoate, potassium or sodium sorbate, sodium propionate, sorbic acid, etc., and combinations thereof.

[1416] Exemplary preservatives include, but are not limited to, vitamin A, vitamin C, vitamin E, beta-carotene, citric acid, ascorbic acid, butylated hydroxyanisol, ethylenediamine, sodium lauryl sulfate (SLS), sodium lauryl ether sulfate (SLES), etc., and combinations thereof.

[1417] In some embodiments, the pH of polynucleotide solutions is maintained between pH 5 and pH 8 to improve stability. Exemplary buffers to control pH can include, but are not limited to sodium phosphate, sodium citrate, sodium succinate, histidine (or histidine-HCl), sodium malate, sodium carbonate, etc., and/or combinations thereof.

[1418] Exemplary lubricating agents include, but are not limited to, magnesium stearate, calcium stearate, stearic acid, silica, talc, malt, hydrogenated vegetable oils, polyethylene glycol, sodium benzoate, sodium or magnesium lauryl sulfate, etc., and combinations thereof.

[1419] The pharmaceutical composition or Formulation described here can contain a cryoprotectant to stabilize a polynucleotide described herein during freezing. Exemplary cryoprotectants include, but are not limited to mannitol, sucrose, trehalose, lactose, glycerol, dextrose, etc., and combinations thereof.

[1420] The pharmaceutical composition or formulation described here can contain a bulking agent in lyophilized polynucleotide formulations to yield a “pharmaceutically elegant” cake, stabilize the lyophilized polynucleotides during long term (e.g., 36 month) storage. Exemplary bulking agents of the present invention can include, but are not limited to sucrose, trehalose, mannitol, glycine, lactose, raffinose, and combinations thereof.

[1421] In some embodiments, the pharmaceutical composition or Formulation further comprises a delivery agent. The delivery agent of the present disclosure can include, without limitation, liposomes, lipid nanoparticles, lipidoids, polymers, lipoplexes, microvesicles, exosomes, peptides, proteins, cells transfected with polynucleotides, hyaluronidase, nanoparticle mimics, nanotubes, conjugates, and combinations thereof.

[1422] Formulations of the disclosure can include one or more excipients, each in an amount that together increases the stability of the polynucleotide, increases cell transfection by the polynucleotide, increases the expression of polynucleotides encoded protein, and/or alters the release profile of polynucleotide encoded proteins. Further, the polynucleotides of the present disclosure can be formulated using self-assembled nucleic acid nanoparticles.

[1423] Formulations of the pharmaceutical compositions described herein can be prepared by any method known or hereafter developed in the art of pharmacology. In general, such preparatory methods include the step of associating the active ingredient with an excipient and/or one or more other accessory ingredients.

[1424] A pharmaceutical composition in accordance with the present disclosure can be prepared, packaged, and/or sold in bulk, as a single unit dose, and/or as a plurality of single unit doses. As used herein, a “unit dose” refers to a discrete amount of the pharmaceutical composition comprising a predetermined amount of the active ingredient. The amount of the active ingredient is generally equal to the dosage of the active ingredient which would be administered to a subject and/or a convenient fraction of such a dosage such as, for example, one-half or one-third of such a dosage.

[1425] Relative amounts of the active ingredient, the pharmaceutically acceptable excipient, and/or any additional ingredients in a pharmaceutical composition in accordance with the present disclosure can vary, depending upon the identity, size, and/or condition of the subject being treated and further depending upon the route by which the composition is to be administered. For example, the composition can comprise between 0.1% and 99% (w/w) of the active ingredient. By way of example, the composition can comprise between 0.1% and 100%, e.g., between 0.5 and 50%, between 1-30%, between 5-80%, at least 80% (w/w) active ingredient.

[1426] In some embodiments, the formulations described herein contain at least one polynucleotide. As a non-limiting example, the formulations contain 1, 2, 3, 4 or 5 polynucleotides.

The use of a conventional excipient medium can be contemplated within the scope of the present disclosure, except insofar as any conventional excipient medium can be incompatible with a substance or its derivatives, such as by producing any undesirable biological effect or otherwise interacting in a deleterious manner with any other component(s) of the pharmaceutical composition.

[1427] In some embodiments, the particle size of the lipid nanoparticle is increased and/or decreased. The change in particle size can be able to help counter biological reaction such as, but not limited to, inflammation or can increase the biological effect of the modified mRNA delivered to mammals.

[1428] Pharmaceutically acceptable excipients used in the manufacture of pharmaceutical compositions include, but are not limited to, inert diluents, surface active agents and/or emulsifiers, preservatives, buffering agents, lubricating agents, and/or oils. Such excipients can optionally be included in the pharmaceutical formulations of the disclosure.

[1429] In some embodiments, the polynucleotides are administered in or with, formulated in or delivered with nanostructures that can sequester molecules such as cholesterol. Non-limiting examples of these nanostructures and methods of making these nanostructures are described in US Patent Publication No. US20130195759. Exemplary structures of these nanostructures are shown in US Patent Publication No. US20130195759, and can include a core and a shell surrounding the core.

### EQUIVALENTS AND SCOPE

[1430] Those skilled in the art will recognize or be able to ascertain using no more than routine experimentation, many equivalents to the specific embodiments in accordance with the disclosure described herein. The scope of the present disclosure is not intended to be limited to the Description below, but rather is as set forth in the appended claims.

[1431] In the claims, articles such as “a,” “an,” and “the” may mean one or more than one unless indicated to the contrary or otherwise evident from the context. Claims or descriptions that include “or” between one or more members of a group are considered satisfied if one, more than one, or all of the group members are present in, employed in, or otherwise relevant to a given product or process unless indicated to the contrary or otherwise evident from the context. The disclosure includes embodiments in which exactly one member of the group is present in, employed in, or otherwise relevant to a given product or process. The disclosure includes embodiments in which more than one, or all of the group members are present in, employed in, or otherwise relevant to a given product or process.

[1432] It is also noted that the term “comprising” is intended to be open and permits but does not require the inclusion of additional elements or steps. When the term “comprising” is used herein, the term “consisting of” is thus also encompassed and disclosed.

[1433] Where ranges are given, endpoints are included. Furthermore, it is to be understood that unless otherwise indicated or otherwise evident from the context and understanding of one of ordinary skill in the art, values that are expressed as ranges can assume any specific value or subrange within the stated ranges in different embodiments of the disclosure, to the tenth of the unit of the lower limit of the range, unless the context clearly dictates otherwise.

[1434] All cited sources, for example, references, publications, databases, database entries, and art cited herein, are incorporated into this application by reference, even if not expressly stated in the citation. In case of conflicting statements of a cited source and the instant application, the statement in the instant application shall control.

### EXAMPLES

[1435] The disclosure will be more fully understood by reference to the following examples. They should not, however, be construed as limiting the scope of the disclosure. It is understood that the examples and embodiments described herein are for illustrative purposes only and that various modifications or changes in light thereof will be suggested to persons skilled in the art and are to be included within the spirit and purview of this application and scope of the appended claims.

Table of contents for Examples

| | |
|---|---|
| Example 1 | Expression of ITB6 mRNA constructs in dendritic cells |
| Example 2 | Induction of Treg differentiation in vitro |
| Example 3 | Inhibition of antigen-specific CD4+ T cell proliferation in vivo |
| Example 4 | De novo Treg differentiation from naïve antigen-specific |
| | CD4+ T cells in vivo |
| Example 5 | Reduction of IFNγ production of antigen-specific CD8+ T |
| | cells upon peptide restimulation |
| Example 6 | Reduction of weight loss, host B cell depletion, and donor T cell |
| | engraftment, with concurrent Treg expansion in GvHD mice |
| Example 7 | Inhibition of donor T cell proliferation in the spleen of GvHD mice |
| Example 8 | Reduction of Tbet+ cells in CD8 T cell population in the |
| | spleen of GvHD mice |
| Example 9 | Reduction of proinflammatory cytokine levels in GvHD mice |
| Example 10 | Maintaining Treg and host lymphocyte populations in GvHD mice |
| Example 11 | Reduction of weight loss and improved survival in GvHD mice |
| Example 12 | Inhibition of antigen-specific CD4+ T cell proliferation in vivo |
| Example 13 | Evaluation of T cell-dependent antibody response |
| Example 14 | Efficacy of ITB6 LNP in acute GvHD |
| Example 15 | Biomarker Studies |
| Example 16 | Evaluation of ITB6 therapy in an EAE mouse model |

### Example 1: Expression of ITB6 mRNA Constructs in Dendritic Cells

[1436] This Example describes the expression of ITB6 mRNA constructs in dendritic cells by mRNA transfection.

[1437] 5×10⁴ murine bone marrow derived dendritic cell line (JAWSII) were transfected with a human or mouse V5 tagged ITB6 mRNA construct, or mock transfected as a control. RNA solutions were prepared by diluting 1 μL of a 250 μg/mL solution with 25 μL of a reduced serum medium, OptiMEM. To prepare liposomes, a transfecting agent, lipofectamine, was incubated in OptiMEM, at room temperature for 10 minutes. The lipofectamine was then added in a 1:1 ratio to the RNA solution and the resultant mixture was incubated at room temperature for an additional five minutes to afford a solution containing liposomes. The liposome solution as added to the JAWSII cells (50 μL). After 24 hours, the JAWSII cells were fixed with BD Cytofix/Cytoperm at 4° C. for 30 minutes, then washed once with BD Perm/Wash and incubated with Anti-V5 (Alexa647) antibodies at 4° C. for 30 minutes. ITB6 expression was measured by flow cytometry.

[1438] As shown in FIGS. 1A-1C, ITB6 expression was detected in JAWSII cells 24 hours after transfection of the human or mouse ITB6 mRNA construct.

### Example 2: Induction of Treg Differentiation In Vitro

[1439] This Example describes the effect of LNP formulated with ITB6 mRNA on Treg differentiation in vitro. ITB8 was also tested but was consistently less efficient than ITB6. Accordingly, subsequent studies focused on ITB6.

[1440] 1×10⁵ JAWSII cells plated in X-VIVO™ 15 medium (1% HEPES and 0.1% BME) were treated with 50 ng of an LNP formulated with mouse or human ITB6 mRNA in a total culture volume of 100 μL. Control samples were treated with an LNP formulated with untranslatable mRNA (NTFIX), mRNA encoding a dead OX40L (dOX40L), and media lacking any LNP. All cultures were incubated overnight. After 20 to 24 hours, 1×10⁵ CD4+ T cells isolated from Foxp3-GFP (marker of Tregs) mice were added to the cell cultures (1:10 dendritic cell to T cell ratio), followed by 1 μg/mL anti-CD3 antibodies and 5 ng/mL IL-2, in the presence and absence of latent TGFβ(2 and 5 ng/mL) for a final cell culture volume of 200 μL. After 72 hours, cultures were measured by flow cytometry to measure the frequency of Foxp3+GFP+ cells.

[1441] As shown in FIGS. 2A-2B, co-culturing CD4+ T cells with dendritic cells treated with an LNP formulated with human or mouse ITB6 mRNA increased the frequency of Foxp3+GFP+ cells in the CD4+ T cell population. These results indicate that ITB6-formulated LNP induced greater Treg differentiation in vitro in the presence of latent TGFβ.

### Example 3: Inhibition of Antigen-Specific CD4+ T Cell Proliferation In Vivo

[1442] This Example describes the effect of LNP formulated ITB6 mRNA on proliferation of antigen-specific CD4+ T cells in vivo.

[1443] Purified carboxyfluorescein succinimidyl ester (CFSE) labeled OTH cells (CD45.2+, 3×10⁶ cells) were adoptively transferred into CD45.1+C57BL/6 mice by intravenous injection. Recipient mice were intravenously injected with an LNP formulated with mouse or human ITB6 mRNA at the time of cell transfer, and 75 μg ovalbumin (OVA) was administered one day post transfer. One set of control mice was not subjected to an injection after adoptive transfer. Additional control mice were dosed with OVA-only or an LNP formulated with dOX40L mRNA. Four days after adoptive transfer (i.e., 3 days after OVA injection), the mice were sacrificed, and spleens were harvested for processing of immune cell populations. The immune cell populations were analyzed by flow cytometry.

[1444] As shown in FIGS. 3A-3B, the frequency and absolute cell counts of OTII (CD45.2+CD4+) cells in the spleen decreased in mice treated with an LNP formulated with mouse or human ITB6 mRNA. As shown in FIGS. 3C-3D, the frequency and absolute cell counts of OTII regulatory T cells (Tregs, CD25+Foxp3+CD45.2+CD4+) in the spleen increased in mice treated with an LNP formulated with mouse or human ITB6 mRNA. As shown in FIGS. 3E-3F, the proliferation of OTII cells in the spleen was inhibited in mice treated with an LNP formulated with mouse or human ITB6 mRNA. These results indicate that ITB6 mRNA-formulated LNP treatment inhibited the proliferation of antigen-specific CD4+ T cells in vivo.

### Example 4: De Novo Treg Differentiation from Naïve Antigen-Specific CD4+ T Cells In Vivo

[1445] This Example describes the effect of LNP formulated ITB6 mRNA on de novo Treg differentiation from naïve antigen-specific CD4+ T cells in vivo.

[1446] Purified CFSE labeled OTII cells lacking Treg cells (RagKO-OTII cells, CD45.2+, 2×10⁶ cells) were adoptively transferred into CD45.1+C57BL/6 mice by intravenous injection. The RagKO-OTII mice lack Tregs. Recipient mice were intravenously injected with an LNP formulated mouse ITB6 mRNA at the time of cell transfer, and 75 μg ovalbumin (OVA) administered one day post transfer. One set of control mice was not subjected to an injection after adoptive transfer. Additional control mice were treated with OVA-only or an LNP formulated with dOX40L mRNA. Four days after adoptive transfer (i.e., 3 days after OVA injection), the mice were sacrificed, and spleens were harvested for processing of immune cell populations. The immune cell populations were analyzed by flow cytometry.

[1447] As shown in FIGS. 4A-4B, the frequency of OTH cells (CD45.2+CD4+)) in the spleen decreased in the mice treated with LNP formulated with mouse ITB6 mRNA. In contrast, the frequency of OTII Tregs increased following treatment with LNP formulated with mouse ITB6 mRNA. As shown in FIGS. 4C-4D, the proliferation of OTII cells in the spleen was inhibited in mice treated with an LNP formulated with mouse ITB6 mRNA. These results indicate that ITB6 mRNA-formulated LNP treatment supported de novo Treg differentiation from naïve antigen specific CD4+ T cells in vivo.

### Example 5: Reduction of IFNγ Production of Antigen-Specific CD8+ T Cells Upon Peptide Restimulation

[1448] This Example describes the effects of LNP formulated ITB6 mRNA on IFNγ production of antigen-specific CD8+ T cells upon peptide restimulation.

[1449] Purified CFSE labeled OTI cells (CD45.2+, 2×10⁶ cells) were adoptively transferred into CD45.1+C57BL/6 mice by intravenous injection. Recipient mice were intravenously injected with LNP formulated with mouse or human ITB6 mRNA at 0.5 mg/kg at the time of cell transfer. One day post-transfer, recipient mice were primed with 20 μg ovalbumin (OVA) by intravenous injection. One set of control mice was not injected with OVA. Additional control mice were treated with OVA-only or an LNP formulated with dOX40L mRNA. Four days after adoptive transfer (i.e., 3 days after OVA injection), the mice were sacrificed, and spleens were harvested for processing of immune cell populations. The immune cell populations were analyzed by flow cytometry. To measure the ability of antigen-specific cells to respond upon restimulation, total splenocytes were incubated in RPMI+10% FBS at 37° C. for 1 hour with 1 μg/mL of the peptide SIINFEKL (SEQ ID NO: 300) (antigen recognized by OTI). After 1 hour, Brefeldin A was added to each culture and cells were incubated for 4 hours. The cultures then underwent intracellular staining for IFNγ.

[1450] As shown in FIGS. 5A-5B, the frequency of IFNγ+ cells in OTI (CD45.2+) cells was reduced in the splenocytes of mice treated with an LNP formulated with mouse ITB6 mRNA. These results indicate that ITB6-formulated LNP treatment reduced IFNγ production in antigen-specific CD8+ T cells upon peptide restimulation.

### Example 6: Reduction of Weight Loss, Host B Cell Depletion, and Donor T Cell Engraftment, with Concurrent Treg Expansion, in GvHD Mice

[1451] This Example describes the effect of LNP formulated with ITB6 mRNA on weight loss, host B cell depletion, donor T cell engraftment, as well as Treg expansion, in an acute Graft vs Host Disease (GvHD) mouse model.

[1452] Spleen and lymph nodes were harvested from naïve donor B6-Ly5.5/Cr mice (H2-K^{b}, strain #564 Charles River Labs) and processed into single cell suspensions. The spleen and lymph node cell suspensions were then treated once with 1×ACK to lyse red blood cells. After red blood cell lysis, the pooled splenocytes and lymph node cells were resuspended at a concentration of 5×10⁷ cells/200 μL in 1×PBS. Recipient B6D2F1 mice (H2-K^{d/b}, strain #099 Charles River Labs) were administered 5×10⁷ cells via intravenous tail vein injection. At the time of cell transfer, mice were also administered either 100 μL of 1×PBS or LNP (0.5 mg/kg). Mice were treated with PBS or LNP once a week. Mice were weighed three times a week until day 22 (21 days post transfer), when mice were sacrificed for immunophenotyping. Mice were bled at various timepoints for immunophenotyping of circulating cells.

[1453] As shown in FIGS. 6A-6B, treatment of GvHD with LNP formulated ITB6 ameliorated weight loss. As shown in FIGS. 6C, 7A, and 8A-8B, treatment of GvHD with LNP formulated ITB6 rescued B cells from depletion. As shown in FIGS. 6D, 7B, and 8C, treatment of GvHD with LNP formulated ITB6 inhibited donor CD8+ T cell engraftment as early as Day 8 and through at least Day 15. As shown in FIGS. 7C-7D and 8D-8E, treatment of GvHD with LNP formulated ITB6 resulted in concurrent expansion of Tregs.

### Example 7: Inhibition of Donor T Cell Proliferation in the Spleen of GvHD Mice

[1454] This Example describes the effect of LNP formulated with ITB6 mRNA on donor T cell proliferation in an acute GvHD mouse model.

[1455] The disease model is described in Example 6. As shown in FIGS. 9A-9E, treatment of GvHD with LNP formulated with ITB6 mRNA inhibited donor T cell proliferation in the spleen.

### Example 8: Reduction of Tbet+ Cells in CD8 T Cell Population in the Spleen of GvHD Mice

[1456] This Example describes the effect of LNP formulated with ITB6 mRNA on Tbet+ cells in an acute GvHD mouse model.

[1457] The disease model is described in Example 6. Spleens were harvested at days 15 (at peak disease) and 22 from GvHD mice. Spleens harvested on day 15 were analyzed for Tbet expression in CD8+ and conventional CD4+ T cells. Tbet is a regulator of IFNγ production.

[1458] As shown in FIGS. 10A-10B, treatment with LNP formulated with ITB6 mRNA resulted in reduction of Tbet+ cells in the CD8+ T cell population in the spleen of the GvHD mice. These results indicate that treatment of GvHD with LNP formulated with ITB6 mRNA decreased inflammatory environment and decreased activation of CD8+ T cells.

### Example 9: Reduction of Proinflammatory Cytokine Levels in GvHD Mice

[1459] This Example describes the effect of LNP formulated with ITB6 mRNA on proinflammatory cytokine levels in an acute GvHD mouse model.

[1460] The disease model is described in Example 6. Serum collected from GvHD mice at day 15 was analyzed using a FirePlex® mouse cytokine array (Abcam) to measure cytokine levels. As shown in FIG. 11, mice treated with LNP formulated with ITB6 mRNA exhibited lower level of inflammatory cytokines, including CXCL1, IFNγ, TNFα, MCP1, M1P1α, IL10, IL13, IL5, IL9, and M1P1β.

### Example 10: Maintaining Treg and Host Lymphocyte Populations in GvHD Mice

[1461] This Example describes the effect of LNP formulated with ITB6 mRNA on maintaining Treg and host lymphocyte populations in an acute GvHD mouse model.

[1462] The disease model is described in Example 6. Spleens harvested on day 22, at the end of the study, were immunophenotyped for lymphocyte populations. As shown in FIGS. 12A-12D, treatment with LNP formulated with ITB6 mRNA helped maintain T reg cell and host lymphocyte populations in the spleen of the GvHD mice.

### Example 11: Reduction of Weight Loss and Improved Survival in GvHD Mice

[1463] This Example describes the effect of LNP formulated with ITB6 mRNA on weight loss and survival in a xeno-Graft vs Host Disease (GvHD) humanized mouse model.

[1464] A second model of GvHD utilized introduction of human peripheral blood mononuclear cells (PBMC) into NOD-scid-gamma (NSG) mice. Briefly, 10e6 human PBMCs were injected into irradiated NSG mice to initiate disease. Mice then received weekly doses of LNP, beginning one day post transfer, throughout the 42-day study (FIG. 13A). As shown in FIG. 13B, mice receiving either PBS or negative control LNP exhibited a high degree of mortality (75-100% death). As an additional control, one arm received high dose tacrolimus to control disease. Even with the aggressive treatment of tacrolimus, ˜50% mortality was observed (FIG. 13B). In contrast, as shown in FIGS. 13B and 13C, administration of ITGB6 resulted in 90% survival with no weight loss of the animals. Despite the greatly improved survival, the human lymphocytes were still able to engraft when ITGB6 was administered. However, the CD8+ T cells showed reduced effector function as evidenced by the reduced frequency of Granzyme B positive CD8 T cells (data not shown). These results demonstrate that ITGB6 may prevent activation of the donor cells or may render them anergic.

### Example 12: Inhibition of Antigen-Specific CD4+ T Cell Proliferation In Vivo

[1465] This Example describes the effect of LNP formulated ITB6 mRNA on proliferation of antigen-specific CD4+ T cells and T regs in vivo.

[1466] Purified carboxyfluorescein succinimidyl ester (CFSE) labeled OTII cells (CD45.2+, 3×10⁶ cells) were adoptively transferred into B6.SJL-PtprcaPepcb/BoyCrl mice by intravenous injection. Recipient mice were intravenously injected with an LNP formulated with human ITB6 mRNA at a dose of 0.5 mpk, 0.33 mpk, 0.1 mpk, 0.05 mpk, or 0.033 mpk at the time of cell transfer, and 75 μg ovalbumin (OVA) was administered one day post transfer. One set of control mice was not subjected to an injection after adoptive transfer. Additional control mice were dosed with OVA-only or an LNP formulated with dOX40L mRNA. Four days after adoptive transfer (i.e., 3 days after OVA injection), the mice were sacrificed, and spleens were harvested for processing of immune cell populations. The immune cell populations were analyzed by flow cytometry.

[1467] As shown in FIGS. 14A and 14D, the frequency of OTII (CD45.2+CD4+) cells in the spleen decreased in mice treated with an LNP formulated with human ITB6 mRNA in a dose-dependent manner. As shown in FIGS. 14B and 14E, the frequency of OTII regulatory T cells (Tregs, CD25+Foxp3+CD45.2+CD4+) in the spleen increased in mice treated with an LNP formulated with human ITB6 mRNA.

[1468] As shown in FIGS. 14C and 14F, the proliferation of OTII cells in the spleen was inhibited in mice treated with an LNP formulated with human ITB6 mRNA.

[1469] These results indicate that ITB6 mRNA-formulated LNP treatment inhibited the proliferation of antigen-specific CD4+ T cells in vivo.

### Example 13: Evaluation of T Cell-Dependent Antibody Response

[1470] This example describes the effect of LNP formulated with ITB6 mRNA on KLH-specific IgM and IgG responses in mice.

[1471] Briefly, mice were dosed intravenously with 250 μg keyhole limpet hemocyanin (KLH) on day 1 and boosted with 150 μg on day 15. Mice were subsequently administered LNPs formulated with mRNA encoding dOX40L (as a control) or ITB6 mRNA. In certain groups, mice were administered a single dose (day 1), two doses (day 1 & 8), or three doses (day 1, 8, & 15) of the LNP formulations. Blood was collected from mice on days 7, 14, and 21. The levels of KLH-specific IgM and IgG were measured from collected samples.

[1472] As shown in FIGS. 15-19, ITB6 reduced KLH-specific IgM and IgG levels compared to controls

### Example 14: Efficacy of ITB6 LNP in Acute GvHD

[1473] This example describes the effect of LNP formulated with ITB6 mRNA on the host lymphocyte populations in an acute GvHD mouse model.

[1474] Spleen and lymph nodes were harvested from naïve donor B6-mice (H2-K^{b/b}) and processed into single cell suspensions. The spleen and lymph node cell suspensions were then treated once with 1×ACK to lyse red blood cells. After red blood cell lysis, the pooled splenocytes and lymph node cells were resuspended in 1×PBS. Recipient B6D2F1 mice (H2-K^{d/b}) were administered 5×10⁷ cells via intravenous tail vein injection. At the time of cell transfer, mice were also administered LNP formulated with mRNA encoding dOX40L or ITB6 (0.033 mg/kg). Mice were treated with LNPs as single dose, weekly, or biweekly. Mice were sacrificed for immunophenotyping at day 22 (21 days post transfer). Mice were bled at various time points for immunophenotyping of circulating cells.

[1475] As shown in FIG. 20, treatment with LNP formulated with ITB6 mRNA helped maintain host lymphocyte populations in the spleen of the GvHD mice.

### Example 15: Biomarker Studies

[1476] This example describes a transcriptomic study that was conducted to identify and assess potential biomarkers as surrogates for measuring efficacy of ITB6 therapy that are differentially expressed following treatment with ITB6 mRNA.

[1477] Briefly, 8-week old, female C57BL/6 mice were treated IV with either an LNP formulated with an mRNA encoding a dead OX40L (dOX40L) control or ITB6 mRNA according to the schedule indicated in FIG. 21. Animals were sacrificed at indicated time points and splenocytes were harvested, prepared, and analyzed by bulk RNA-sequencing. Raw sequencing results were aligned to mouse genome using STAR and the gene expression was quantified using HTseq count (FIG. 22).

[1478] The counts matrix from all the samples were further analyzed for identifying differentially expressed genes using custom scripts and DESeq2.

[1479] From an original list of 776 genes, 12 were identified for further investigation. To this end, further analyses were performed on PBMCs isolated from mouse, rat, and NHP dosed with ITB6 or control mRNA, and human PBMCs treated with ITB6 or control mRNA in vitro.

[1480] From these studies, the six genes (Pmepa1, Itgae/CD103, Smad7, Skil, and Ski) downstream of the TGFb pathway were identified as biomarkers of interest for monitoring the efficacy of ITB6 therapy (FIG. 23).

### Example 16: Evaluation of ITB6 Therapy in an EAE Mouse Model

[1481] This example describes a study conducted in a mouse model of EAE to explore the effects of treatment with LNPs formulated with mRNA encoding ITB6.

[1482] Briefly, EAE was induced in 12-week-old female C57bl/6 mice. Mice received 100 μg of rat MOG₃₅₋₅₅ in 100 μl of CFA distributed to two sites on the lower back (50 μl/site). CFA was supplemented to 2.5 mg/ml with killed M. tuberculosis (H37 RA). Mice then received 200 ng/mouse Pertussis toxin i.p. on days 0 and 2. Mice were administered LNPs formulated with dmOX40L, LNPs formulated with mRNA encoding ITB6, or vehicle controls at a dose of 0.5 mpk i.v. on days −1, 6, and 9. Mice were evaluated and scored for EAE starting on day 10.

[1483] As shown in FIG. 24, treatment with LNPs formulated with mRNA encoding ITB6 at 0.5 mpk dosed IV on days −1, 6, and 13 results in decreased clinical score (FIG. 24A) and delayed disease onset (FIG. 24B).

### OTHER EMBODIMENTS

[1484] It is to be understood that while the present disclosure has been described in conjunction with the detailed description thereof, the foregoing description is intended to illustrate and not limit the scope of the present disclosure, which is defined by the scope of the appended claims. Other aspects, advantages, and alterations are within the scope of the following claims. All references described herein are incorporated by reference in their entireties.

What is claimed is:

1. A lipid nanoparticle (LNP) composition comprising a polynucleotide comprising an mRNA which encodes an ITB6 molecule.

2. A lipid nanoparticle (LNP) composition for immunomodulation, e.g., for inducing immune tolerance or reprogramming dendritic cells, the composition comprising a polynucleotide comprising an mRNA which encodes an ITB6 molecule, wherein the polynucleotide comprises an mRNA.

3. The LNP composition of claim 1 or 2, wherein the ITB6 molecule comprises an amino acid sequence having at least 85%, 90%, 95%, 96%, 97%, 98%, 99% or 100% identity to an amino acid sequence of ITB6 provided in Table 1A or Table 2A, e.g., any one of SEQ ID NOs: 17, 1, 7, 9, 11, 13, or 15.

4. The LNP composition of claim 3, wherein the ITB6 molecule comprises an amino acid sequence of any one of SEQ ID NOs: 17, 1, 7, 9, 11, 13, or 15.

5. The LNP composition of claim 1 or 2, wherein the mRNA comprises a nucleic acid sequence having at least 85%, 90%, 95%, 96%, 97%, 98%, 99% or 100% identity to a nucleic acid sequence of any one of SEQ ID NOs: 17, 1, 7, 9, 11, 13, or 15.

6. The LNP composition of any one of claims 1-5, which results in suppression of T cell activity and/or function (e.g., T cell anergy, and/or T cell apoptosis) in a population of immune cells, e.g., as compared to T cell activity and/or function in an otherwise similar population of cells which has not been contacted with the LNP composition comprising a polynucleotide comprising an mRNA which encodes an ITB6 molecule.

7. The LNP composition of claim 6, wherein suppression of T cell activity and/or function comprises any one, two, three, or all of the following:
(i) increased level of Treg differentiation;
(ii) reduced T cell proliferation, survival and/or expansion (e.g., reduced CD4+ T cell proliferation, survival and/or expansion);
(iii) reduced expression, activity and/or secretion of an effector cytokine (e.g., IFNg); and/or
(iv) reduced expression and/or activity of a T cell transcription factor (e.g., T-bet).

8. The LNP composition of any one of claims 1-7, wherein the LNP composition reduces the level (e.g., expression) and/or activity of a costimulatory molecule, e.g., CD80, CD86, and/or MHCII, in a sample upon stimulation.

9. The LNP composition of any one of claims 1-8, which results in:
(i) reduced donor immune cell (e.g., T cell) proliferation;
(ii) reduced weight loss, host B cell depletion, and/or donor immune cell (e.g., T cell) engraftment, optionally with concurrent Treg expansion;
(iii) reduced Tbet+ cells in T cell population (e.g., CD8+ T cell population);
(iv) reduced expression, activity and/or secretion of a proinflammatory cytokine (e.g., IFNg); and/or
(v) maintained or increased Treg and/or host lymphocyte population.

10. The LNP composition of any one of the preceding claims, which results in amelioration or reduction of graft vs. host disease, e.g., reduction of weight loss and/or B cell depletion, e.g., as described herein, in a subject, e.g., as measured by an assay described in Example 6.

11. The LNP composition of any one of the preceding claims, which results in a reduction of blood glucose levels in a sample, e.g., a sample from a subject.

12. The LNP composition of any one of the preceding claims, wherein the polynucleotide comprising an mRNA encoding the ITB6 molecule, comprises at least one chemical modification.

13. The LNP composition of claim 12, wherein the chemical modification is selected from the group consisting of pseudouridine, N1-methylpseudouridine, 2-thiouridine, 4′-thiouridine, 5-methylcytosine, 2-thio-1-methyl-1-deaza-pseudouridine, 2-thio-1-methyl-pseudouridine, 2-thio-5-aza-uridine, 2-thio-dihydropseudouridine, 2-thio-dihydrouridine, 2-thio-pseudouridine, 4-methoxy-2-thio-pseudouridine, 4-methoxy-pseudouridine, 4-thio-1-methyl-pseudouridine, 4-thio-pseudouridine, 5-aza-uridine, dihydropseudouridine, 5-methyluridine, 5-methyluridine, 5-methoxyuridine, and 2′-O-methyl uridine.

14. The LNP composition of any one of the preceding claims, wherein the LNP composition comprises: (i) an ionizable lipid, e.g., an amino lipid; (ii) a sterol or other structural lipid; (iii) a non-cationic helper lipid or phospholipid; and (iv) a PEG-lipid.

15. The LNP composition of claim 14, wherein the ionizable lipid comprises Compound 18.

16. The LNP composition of claim 14, wherein the ionizable lipid comprises Compound 25.

17. A method of modulating, e.g., suppressing, an immune response in a subject, comprising administering to the subject in need thereof an effective amount of an LNP composition comprising an mRNA which encodes an ITB6 molecule.

18. A method of treating or preventing a symptom of, a disease with aberrant T cell function, e.g., an autoimmune disease or an inflammatory disease, or a symptom thereof, comprising administering to the subject in need thereof an effective amount of an LNP composition comprising an mRNA which encodes an ITB6 molecule.

19. The method of claim 18, wherein the disease is chosen from: rheumatoid arthritis (RA); graft versus host disease (GVHD) (e.g., acute GVHD or chronic GVHD); diabetes, e.g., Type 1 diabetes; inflammatory bowel disease (IBD); lupus (e.g., systemic lupus erythematosus (SLE)), multiple sclerosis; autoimmune hepatitis (e.g., Type 1 or Type 2); primary biliary cholangitis; organ transplant associated rejection; or myasthenia gravis.

20. The method of any one of claims 17-19, wherein the LNP composition comprises: (i) an ionizable lipid, e.g., an amino lipid; (ii) a sterol or other structural lipid; (iii) a non-cationic helper lipid or phospholipid; and (iv) a PEG-lipid.

21. The method of claim 20, wherein the ionizable lipid comprises Compound 18.

22. The method of claim 20, wherein the ionizable lipid comprises Compound 25.

23. A method of assessing the responsiveness of a subject to a therapy comprising an LNP composition comprising an mRNA which encodes an ITB6 molecule, the method comprising:
(a) measuring the expression level of one or more biomarkers (e.g., selected from the group consisting of: PMEPA1, ITGAE/CD103, SMAD7, SKIL, and SKI) in a sample from the subject collected following administration of the therapy; and
(b) comparing the expression level in the sample with a reference expression level, wherein an increase in the expression level of the one or more biomarkers is indicative of a response to the therapy.

24. The method of claim 23, wherein the one or more biomarkers are one or more of PMEPA1, ITGAE/CD103, SMAD7, SKIL, and SKI.

25. The method of claim 23 or 24, wherein the level of one or more of the one or more biomarkers in the sample from the subject following treatment is at least 2-fold greater than a reference expression level of the one or more biomarkers, wherein the reference expression level comprises:
(a) the expression level of the one or more biomarkers in a sample from the subject prior to treatment with an ITB6 mRNA; or
(b) the expression level of the one or more biomarkers in a sample from a subject who has not received the treatment with an ITB6 mRNA.

The application's sequence listing, which the Patent Office published only in electronic form, follows.

SEQUENCE LISTING (505 sequences)

SEQ ID NO: 1 - protein, 802 aa, unidentified
MGIELLCLFFLFLGRNDHVQGGCALGGAETCEDCLLIGPQCAWCAQENFTHPSGVGERCDTPANLLAKGCQLNFIENPVSQVEILKNKPLSVGRQKNSSDIVQIAPQSLILKLRPGGAQTLQVHVRQTEDYPVDLYYLMDLSASMDDDLNTIKELGSRLSKEMSKLTSNFRLGFGSFVEKPVSPFVKTTPEEIANPCSSIPYFCLPTFGFKHILPLTNDAERFNEIVKNQKISANIDTPEGGFDAIMQAAVCKEKIGWRNDSLHLLVFVSDADSHFGMDSKLAGIVIPNDGLCHLDSKNEYSMSTVLEYPTIGQLIDKLVQNNVLLIFAVTQEQVHLYENYAKLIPGATVGLLQKDSGNILQLIISAYEELRSEVELEVLGDTEGLNLSFTAICNNGTLFQHQKKCSHMKVGDTASFSVTVNIPHCERRSRHIIIKPVGLGDALELLVSPECNCDCQKEVEVNSSKCHHGNGSFQCGVCACHPGHMGPRCECGEDMLSTDSCKEAPDHPSCSGRGDCYCGQCICHLSPYGNIYGPYCQCDNFSCVRHKGLLCGGNGDCDCGECVCRSGWTGEYCNCTTSTDSCVSEDGVLCSGRGDCVCGKCVCTNPGASGPTCERCPTCGDPCNSKRSCIECHLSAAGQAREECVDKCKLAGATISEEEDFSKDGSVSCSLQGENECLITFLITTDNEGKTIIHSINEKDCPKPPNIPMIMLGVSLAILLIGVVLLCIWKLLVSFHDRKEVAKFEAERSKAKWQTGTNPLYRGSTSTFKNVTYKHREKQKVDLSTDCGKPIPNPLLGLDST

SEQ ID NO: 2 - RNA, 2406 nt, unidentified
  source 1..2406: mol_type = unassigned RNA
  misc_difference 2: note = uracil or N1-methylpseudouracil
  misc_difference 8: note = uracil or N1-methylpseudouracil
  misc_difference 14: note = uracil or N1-methylpseudouracil
  misc_difference 17: note = uracil or N1-methylpseudouracil
  misc_difference 19: note = uracil or N1-methylpseudouracil
  misc_difference 23: note = uracil or N1-methylpseudouracil
  misc_difference 25: note = uracil or N1-methylpseudouracil
  misc_difference 26: note = uracil or N1-methylpseudouracil
  misc_difference 28: note = uracil or N1-methylpseudouracil
  misc_difference 29: note = uracil or N1-methylpseudouracil
  misc_difference 32: note = uracil or N1-methylpseudouracil
  misc_difference 34: note = uracil or N1-methylpseudouracil
  misc_difference 35: note = uracil or N1-methylpseudouracil
  misc_difference 38: note = uracil or N1-methylpseudouracil
  misc_difference 56: note = uracil or N1-methylpseudouracil
  misc_difference 66: note = uracil or N1-methylpseudouracil
  misc_difference 67: note = uracil or N1-methylpseudouracil
  misc_difference 74: note = uracil or N1-methylpseudouracil
  misc_difference 81: note = uracil or N1-methylpseudouracil
  misc_difference 91: note = uracil or N1-methylpseudouracil
  misc_difference 100: note = uracil or N1-methylpseudouracil
  misc_difference 104: note = uracil or N1-methylpseudouracil
  misc_difference 107: note = uracil or N1-methylpseudouracil
  misc_difference 110: note = uracil or N1-methylpseudouracil
  misc_difference 117: note = uracil or N1-methylpseudouracil
  misc_difference 121: note = uracil or N1-methylpseudouracil
  misc_difference 127: note = uracil or N1-methylpseudouracil
  misc_difference 130: note = uracil or N1-methylpseudouracil
  misc_difference 145: note = uracil or N1-methylpseudouracil
  misc_difference 146: note = uracil or N1-methylpseudouracil
  misc_difference 156: note = uracil or N1-methylpseudouracil
  misc_difference 164: note = uracil or N1-methylpseudouracil
  misc_difference 175: note = uracil or N1-methylpseudouracil
  misc_difference 186: note = uracil or N1-methylpseudouracil
  misc_difference 194: note = uracil or N1-methylpseudouracil
  misc_difference 197: note = uracil or N1-methylpseudouracil
  misc_difference 208: note = uracil or N1-methylpseudouracil
  misc_difference 215: note = uracil or N1-methylpseudouracil
  misc_difference 220: note = uracil or N1-methylpseudouracil
  misc_difference 221: note = uracil or N1-methylpseudouracil
  misc_difference 224: note = uracil or N1-methylpseudouracil
  misc_difference 234: note = uracil or N1-methylpseudouracil
  misc_difference 236: note = uracil or N1-methylpseudouracil
  misc_difference 245: note = uracil or N1-methylpseudouracil
  misc_difference 251: note = uracil or N1-methylpseudouracil
  misc_difference 254: note = uracil or N1-methylpseudouracil
  misc_difference 267: note = uracil or N1-methylpseudouracil
  misc_difference 269: note = uracil or N1-methylpseudouracil
  misc_difference 275: note = uracil or N1-methylpseudouracil
  misc_difference 302: note = uracil or N1-methylpseudouracil
  misc_difference 305: note = uracil or N1-methylpseudouracil
  misc_difference 311: note = uracil or N1-methylpseudouracil
  misc_difference 318: note = uracil or N1-methylpseudouracil
  misc_difference 326: note = uracil or N1-methylpseudouracil
  misc_difference 329: note = uracil or N1-methylpseudouracil
  misc_difference 330: note = uracil or N1-methylpseudouracil
  misc_difference 331: note = uracil or N1-methylpseudouracil
  misc_difference 332: note = uracil or N1-methylpseudouracil
  misc_difference 338: note = uracil or N1-methylpseudouracil
  misc_difference 345: note = uracil or N1-methylpseudouracil
  misc_difference 362: note = uracil or N1-methylpseudouracil
  misc_difference 368: note = uracil or N1-methylpseudouracil
  misc_difference 374: note = uracil or N1-methylpseudouracil
  misc_difference 391: note = uracil or N1-methylpseudouracil
  misc_difference 396: note = uracil or N1-methylpseudouracil
  misc_difference 398: note = uracil or N1-methylpseudouracil
  misc_difference 404: note = uracil or N1-methylpseudouracil
  misc_difference 406: note = uracil or N1-methylpseudouracil
  misc_difference 409: note = uracil or N1-methylpseudouracil
  misc_difference 413: note = uracil or N1-methylpseudouracil
  misc_difference 416: note = uracil or N1-methylpseudouracil
  misc_difference 422: note = uracil or N1-methylpseudouracil
  misc_difference 434: note = uracil or N1-methylpseudouracil
  misc_difference 446: note = uracil or N1-methylpseudouracil
  misc_difference 455: note = uracil or N1-methylpseudouracil
  misc_difference 464: note = uracil or N1-methylpseudouracil
  misc_difference 476: note = uracil or N1-methylpseudouracil
  misc_difference 488: note = uracil or N1-methylpseudouracil
  misc_difference 497: note = uracil or N1-methylpseudouracil
  misc_difference 508: note = uracil or N1-methylpseudouracil
  misc_difference 509: note = uracil or N1-methylpseudouracil
  misc_difference 515: note = uracil or N1-methylpseudouracil
  misc_difference 520: note = uracil or N1-methylpseudouracil
  misc_difference 521: note = uracil or N1-methylpseudouracil
  misc_difference 529: note = uracil or N1-methylpseudouracil
  misc_difference 530: note = uracil or N1-methylpseudouracil
  misc_difference 533: note = uracil or N1-methylpseudouracil
  misc_difference 543: note = uracil or N1-methylpseudouracil
  misc_difference 545: note = uracil or N1-methylpseudouracil
  misc_difference 547: note = uracil or N1-methylpseudouracil
  misc_difference 552: note = uracil or N1-methylpseudouracil
  misc_difference 553: note = uracil or N1-methylpseudouracil
  misc_difference 554: note = uracil or N1-methylpseudouracil
  misc_difference 557: note = uracil or N1-methylpseudouracil
  misc_difference 570: note = uracil or N1-methylpseudouracil
  misc_difference 578: note = uracil or N1-methylpseudouracil
  misc_difference 588: note = uracil or N1-methylpseudouracil
  misc_difference 589: note = uracil or N1-methylpseudouracil
  misc_difference 599: note = uracil or N1-methylpseudouracil
  misc_difference 603: note = uracil or N1-methylpseudouracil
  misc_difference 604: note = uracil or N1-methylpseudouracil
  misc_difference 607: note = uracil or N1-methylpseudouracil
  misc_difference 608: note = uracil or N1-methylpseudouracil
  misc_difference 610: note = uracil or N1-methylpseudouracil
  misc_difference 614: note = uracil or N1-methylpseudouracil
  misc_difference 618: note = uracil or N1-methylpseudouracil
  misc_difference 622: note = uracil or N1-methylpseudouracil
  misc_difference 623: note = uracil or N1-methylpseudouracil
  misc_difference 628: note = uracil or N1-methylpseudouracil
  misc_difference 629: note = uracil or N1-methylpseudouracil
  misc_difference 638: note = uracil or N1-methylpseudouracil
  misc_difference 641: note = uracil or N1-methylpseudouracil
  misc_difference 645: note = uracil or N1-methylpseudouracil
  misc_difference 647: note = uracil or N1-methylpseudouracil
  misc_difference 667: note = uracil or N1-methylpseudouracil
  misc_difference 668: note = uracil or N1-methylpseudouracil
  misc_difference 677: note = uracil or N1-methylpseudouracil
  misc_difference 680: note = uracil or N1-methylpseudouracil
  misc_difference 681: note = uracil or N1-methylpseudouracil
  misc_difference 695: note = uracil or N1-methylpseudouracil
  misc_difference 707: note = uracil or N1-methylpseudouracil
  misc_difference 711: note = uracil or N1-methylpseudouracil
  misc_difference 714: note = uracil or N1-methylpseudouracil
  misc_difference 726: note = uracil or N1-methylpseudouracil
  misc_difference 727: note = uracil or N1-methylpseudouracil
  misc_difference 728: note = uracil or N1-methylpseudouracil
  misc_difference 737: note = uracil or N1-methylpseudouracil
  misc_difference 740: note = uracil or N1-methylpseudouracil
  misc_difference 752: note = uracil or N1-methylpseudouracil
  misc_difference 754: note = uracil or N1-methylpseudouracil
  misc_difference 756: note = uracil or N1-methylpseudouracil
  misc_difference 767: note = uracil or N1-methylpseudouracil
  misc_difference 772: note = uracil or N1-methylpseudouracil
  misc_difference 788: note = uracil or N1-methylpseudouracil
  misc_difference 792: note = uracil or N1-methylpseudouracil
  misc_difference 794: note = uracil or N1-methylpseudouracil
  misc_difference 795: note = uracil or N1-methylpseudouracil
  misc_difference 796: note = uracil or N1-methylpseudouracil
  misc_difference 797: note = uracil or N1-methylpseudouracil
  misc_difference 800: note = uracil or N1-methylpseudouracil
  misc_difference 802: note = uracil or N1-methylpseudouracil
  misc_difference 803: note = uracil or N1-methylpseudouracil
  misc_difference 806: note = uracil or N1-methylpseudouracil
  misc_difference 810: note = uracil or N1-methylpseudouracil
  misc_difference 826: note = uracil or N1-methylpseudouracil
  misc_difference 827: note = uracil or N1-methylpseudouracil
  misc_difference 833: note = uracil or N1-methylpseudouracil
  misc_difference 838: note = uracil or N1-methylpseudouracil
  misc_difference 840: note = uracil or N1-methylpseudouracil
  misc_difference 844: note = uracil or N1-methylpseudouracil
  misc_difference 845: note = uracil or N1-methylpseudouracil
  misc_difference 854: note = uracil or N1-methylpseudouracil
  misc_difference 857: note = uracil or N1-methylpseudouracil
  misc_difference 860: note = uracil or N1-methylpseudouracil
  misc_difference 864: note = uracil or N1-methylpseudouracil
  misc_difference 875: note = uracil or N1-methylpseudouracil
  misc_difference 877: note = uracil or N1-methylpseudouracil
  misc_difference 884: note = uracil or N1-methylpseudouracil
  misc_difference 901: note = uracil or N1-methylpseudouracil
  misc_difference 908: note = uracil or N1-methylpseudouracil
  misc_difference 917: note = uracil or N1-methylpseudouracil
  misc_difference 920: note = uracil or N1-methylpseudouracil
  misc_difference 925: note = uracil or N1-methylpseudouracil
  misc_difference 930: note = uracil or N1-methylpseudouracil
  misc_difference 935: note = uracil or N1-methylpseudouracil
  misc_difference 939: note = uracil or N1-methylpseudouracil
  misc_difference 944: note = uracil or N1-methylpseudouracil
  misc_difference 947: note = uracil or N1-methylpseudouracil
  misc_difference 956: note = uracil or N1-methylpseudouracil
  misc_difference 959: note = uracil or N1-methylpseudouracil
  misc_difference 971: note = uracil or N1-methylpseudouracil
  misc_difference 974: note = uracil or N1-methylpseudouracil
  misc_difference 977: note = uracil or N1-methylpseudouracil
  misc_difference 980: note = uracil or N1-methylpseudouracil
  misc_difference 982: note = uracil or N1-methylpseudouracil
  misc_difference 983: note = uracil or N1-methylpseudouracil
  misc_difference 989: note = uracil or N1-methylpseudouracil
  misc_difference 1004: note = uracil or N1-methylpseudouracil
  misc_difference 1010: note = uracil or N1-methylpseudouracil
  misc_difference 1012: note = uracil or N1-methylpseudouracil
  misc_difference 1021: note = uracil or N1-methylpseudouracil
  misc_difference 1031: note = uracil or N1-methylpseudouracil
  misc_difference 1034: note = uracil or N1-methylpseudouracil
  misc_difference 1038: note = uracil or N1-methylpseudouracil
  misc_difference 1049: note = uracil or N1-methylpseudouracil
  misc_difference 1055: note = uracil or N1-methylpseudouracil
  misc_difference 1058: note = uracil or N1-methylpseudouracil
  misc_difference 1077: note = uracil or N1-methylpseudouracil
  misc_difference 1079: note = uracil or N1-methylpseudouracil
  misc_difference 1081: note = uracil or N1-methylpseudouracil
  misc_difference 1082: note = uracil or N1-methylpseudouracil
  misc_difference 1087: note = uracil or N1-methylpseudouracil
  misc_difference 1088: note = uracil or N1-methylpseudouracil
  misc_difference 1091: note = uracil or N1-methylpseudouracil
  misc_difference 1092: note = uracil or N1-methylpseudouracil
  misc_difference 1094: note = uracil or N1-methylpseudouracil
  misc_difference 1095: note = uracil or N1-methylpseudouracil
  misc_difference 1096: note = uracil or N1-methylpseudouracil
  misc_difference 1102: note = uracil or N1-methylpseudouracil
  misc_difference 1112: note = uracil or N1-methylpseudouracil
  misc_difference 1124: note = uracil or N1-methylpseudouracil
  misc_difference 1130: note = uracil or N1-methylpseudouracil
  misc_difference 1136: note = uracil or N1-methylpseudouracil
  misc_difference 1139: note = uracil or N1-methylpseudouracil
  misc_difference 1157: note = uracil or N1-methylpseudouracil
  misc_difference 1163: note = uracil or N1-methylpseudouracil
  misc_difference 1168: note = uracil or N1-methylpseudouracil
  misc_difference 1169: note = uracil or N1-methylpseudouracil
  misc_difference 1178: note = uracil or N1-methylpseudouracil
  misc_difference 1180: note = uracil or N1-methylpseudouracil
  misc_difference 1196: note = uracil or N1-methylpseudouracil
  misc_difference 1198: note = uracil or N1-methylpseudouracil
  misc_difference 1199: note = uracil or N1-methylpseudouracil
  misc_difference 1206: note = uracil or N1-methylpseudouracil
  misc_difference 1216: note = uracil or N1-methylpseudouracil
  misc_difference 1226: note = uracil or N1-methylpseudouracil
  misc_difference 1232: note = uracil or N1-methylpseudouracil
  misc_difference 1239: note = uracil or N1-methylpseudouracil
  misc_difference 1249: note = uracil or N1-methylpseudouracil
  misc_difference 1250: note = uracil or N1-methylpseudouracil
  misc_difference 1256: note = uracil or N1-methylpseudouracil
  misc_difference 1262: note = uracil or N1-methylpseudouracil
  misc_difference 1268: note = uracil or N1-methylpseudouracil
  misc_difference 1272: note = uracil or N1-methylpseudouracil
  misc_difference 1276: note = uracil or N1-methylpseudouracil
  misc_difference 1298: note = uracil or N1-methylpseudouracil
  misc_difference 1301: note = uracil or N1-methylpseudouracil
  misc_difference 1304: note = uracil or N1-methylpseudouracil
  misc_difference 1311: note = uracil or N1-methylpseudouracil
  misc_difference 1313: note = uracil or N1-methylpseudouracil
  misc_difference 1319: note = uracil or N1-methylpseudouracil
  misc_difference 1320: note = uracil or N1-methylpseudouracil
  misc_difference 1323: note = uracil or N1-methylpseudouracil
  misc_difference 1331: note = uracil or N1-methylpseudouracil
  misc_difference 1337: note = uracil or N1-methylpseudouracil
  misc_difference 1340: note = uracil or N1-methylpseudouracil
  misc_difference 1343: note = uracil or N1-methylpseudouracil
  misc_difference 1345: note = uracil or N1-methylpseudouracil
  misc_difference 1354: note = uracil or N1-methylpseudouracil
  misc_difference 1360: note = uracil or N1-methylpseudouracil
  misc_difference 1366: note = uracil or N1-methylpseudouracil
  misc_difference 1368: note = uracil or N1-methylpseudouracil
  misc_difference 1379: note = uracil or N1-methylpseudouracil
  misc_difference 1385: note = uracil or N1-methylpseudouracil
  misc_difference 1386: note = uracil or N1-methylpseudouracil
  misc_difference 1390: note = uracil or N1-methylpseudouracil
  misc_difference 1392: note = uracil or N1-methylpseudouracil
  misc_difference 1393: note = uracil or N1-methylpseudouracil
  misc_difference 1395: note = uracil or N1-methylpseudouracil
  misc_difference 1399: note = uracil or N1-methylpseudouracil
  misc_difference 1419: note = uracil or N1-methylpseudouracil
  misc_difference 1420: note = uracil or N1-methylpseudouracil
  misc_difference 1421: note = uracil or N1-methylpseudouracil
  misc_difference 1426: note = uracil or N1-methylpseudouracil
  misc_difference 1433: note = uracil or N1-methylpseudouracil
  misc_difference 1435: note = uracil or N1-methylpseudouracil
  misc_difference 1437: note = uracil or N1-methylpseudouracil
  misc_difference 1441: note = uracil or N1-methylpseudouracil
  misc_difference 1449: note = uracil or N1-methylpseudouracil
  misc_difference 1457: note = uracil or N1-methylpseudouracil
  misc_difference 1464: note = uracil or N1-methylpseudouracil
  misc_difference 1468: note = uracil or N1-methylpseudouracil
  misc_difference 1474: note = uracil or N1-methylpseudouracil
  misc_difference 1487: note = uracil or N1-methylpseudouracil
  misc_difference 1490: note = uracil or N1-methylpseudouracil
  misc_difference 1492: note = uracil or N1-methylpseudouracil
  misc_difference 1494: note = uracil or N1-methylpseudouracil
  misc_difference 1497: note = uracil or N1-methylpseudouracil
  misc_difference 1504: note = uracil or N1-methylpseudouracil
  misc_difference 1506: note = uracil or N1-methylpseudouracil
  misc_difference 1518: note = uracil or N1-methylpseudouracil
  misc_difference 1524: note = uracil or N1-methylpseudouracil
  misc_difference 1530: note = uracil or N1-methylpseudouracil
  misc_difference 1531: note = uracil or N1-methylpseudouracil
  misc_difference 1533: note = uracil or N1-methylpseudouracil
  misc_difference 1549: note = uracil or N1-methylpseudouracil
  misc_difference 1552: note = uracil or N1-methylpseudouracil
  misc_difference 1555: note = uracil or N1-methylpseudouracil
  misc_difference 1564: note = uracil or N1-methylpseudouracil
  misc_difference 1568: note = uracil or N1-methylpseudouracil
  misc_difference 1570: note = uracil or N1-methylpseudouracil
  misc_difference 1575: note = uracil or N1-methylpseudouracil
  misc_difference 1577: note = uracil or N1-methylpseudouracil
  misc_difference 1579: note = uracil or N1-methylpseudouracil
  misc_difference 1581: note = uracil or N1-methylpseudouracil
  misc_difference 1585: note = uracil or N1-methylpseudouracil
  misc_difference 1593: note = uracil or N1-methylpseudouracil
  misc_difference 1595: note = uracil or N1-methylpseudouracil
  misc_difference 1597: note = uracil or N1-methylpseudouracil
  misc_difference 1605: note = uracil or N1-methylpseudouracil
  misc_difference 1606: note = uracil or N1-methylpseudouracil
  misc_difference 1609: note = uracil or N1-methylpseudouracil
  misc_difference 1615: note = uracil or N1-methylpseudouracil
  misc_difference 1623: note = uracil or N1-methylpseudouracil
  misc_difference 1624: note = uracil or N1-methylpseudouracil
  misc_difference 1625: note = uracil or N1-methylpseudouracil
  misc_difference 1630: note = uracil or N1-methylpseudouracil
  misc_difference 1634: note = uracil or N1-methylpseudouracil
  misc_difference 1635: note = uracil or N1-methylpseudouracil
  misc_difference 1647: note = uracil or N1-methylpseudouracil
  misc_difference 1649: note = uracil or N1-methylpseudouracil
  misc_difference 1650: note = uracil or N1-methylpseudouracil
  misc_difference 1652: note = uracil or N1-methylpseudouracil
  misc_difference 1654: note = uracil or N1-methylpseudouracil
  misc_difference 1656: note = uracil or N1-methylpseudouracil
  misc_difference 1671: note = uracil or N1-methylpseudouracil
  misc_difference 1672: note = uracil or N1-methylpseudouracil
  misc_difference 1674: note = uracil or N1-methylpseudouracil
  misc_difference 1677: note = uracil or N1-methylpseudouracil
  misc_difference 1678: note = uracil or N1-methylpseudouracil
  misc_difference 1683: note = uracil or N1-methylpseudouracil
  misc_difference 1687: note = uracil or N1-methylpseudouracil
  misc_difference 1691: note = uracil or N1-methylpseudouracil
  misc_difference 1693: note = uracil or N1-methylpseudouracil
  misc_difference 1705: note = uracil or N1-methylpseudouracil
  misc_difference 1717: note = uracil or N1-methylpseudouracil
  misc_difference 1720: note = uracil or N1-methylpseudouracil
  misc_difference 1725: note = uracil or N1-methylpseudouracil
  misc_difference 1726: note = uracil or N1-methylpseudouracil
  misc_difference 1735: note = uracil or N1-methylpseudouracil
  misc_difference 1740: note = uracil or N1-methylpseudouracil
  misc_difference 1747: note = uracil or N1-methylpseudouracil
  misc_difference 1751: note = uracil or N1-methylpseudouracil
  misc_difference 1766: note = uracil or N1-methylpseudouracil
  misc_difference 1769: note = uracil or N1-methylpseudouracil
  misc_difference 1771: note = uracil or N1-methylpseudouracil
  misc_difference 1789: note = uracil or N1-methylpseudouracil
  misc_difference 1791: note = uracil or N1-methylpseudouracil
  misc_difference 1793: note = uracil or N1-methylpseudouracil
  misc_difference 1794: note = uracil or N1-methylpseudouracil
  misc_difference 1795: note = uracil or N1-methylpseudouracil
  misc_difference 1804: note = uracil or N1-methylpseudouracil
  misc_difference 1806: note = uracil or N1-methylpseudouracil
  misc_difference 1808: note = uracil or N1-methylpseudouracil
  misc_difference 1810: note = uracil or N1-methylpseudouracil
  misc_difference 1818: note = uracil or N1-methylpseudouracil
  misc_difference 1821: note = uracil or N1-methylpseudouracil
  misc_difference 1824: note = uracil or N1-methylpseudouracil
  misc_difference 1827: note = uracil or N1-methylpseudouracil
  misc_difference 1836: note = uracil or N1-methylpseudouracil
  misc_difference 1839: note = uracil or N1-methylpseudouracil
  misc_difference 1840: note = uracil or N1-methylpseudouracil
  misc_difference 1849: note = uracil or N1-methylpseudouracil
  misc_difference 1858: note = uracil or N1-methylpseudouracil
  misc_difference 1860: note = uracil or N1-methylpseudouracil
  misc_difference 1870: note = uracil or N1-methylpseudouracil
  misc_difference 1876: note = uracil or N1-methylpseudouracil
  misc_difference 1888: note = uracil or N1-methylpseudouracil
  misc_difference 1892: note = uracil or N1-methylpseudouracil
  misc_difference 1897: note = uracil or N1-methylpseudouracil
  misc_difference 1899: note = uracil or N1-methylpseudouracil
  misc_difference 1904: note = uracil or N1-methylpseudouracil
  misc_difference 1906: note = uracil or N1-methylpseudouracil
  misc_difference 1911: note = uracil or N1-methylpseudouracil
  misc_difference 1933: note = uracil or N1-methylpseudouracil
  misc_difference 1935: note = uracil or N1-methylpseudouracil
  misc_difference 1937: note = uracil or N1-methylpseudouracil
  misc_difference 1938: note = uracil or N1-methylpseudouracil
  misc_difference 1945: note = uracil or N1-methylpseudouracil
  misc_difference 1951: note = uracil or N1-methylpseudouracil
  misc_difference 1952: note = uracil or N1-methylpseudouracil
  misc_difference 1956: note = uracil or N1-methylpseudouracil
  misc_difference 1967: note = uracil or N1-methylpseudouracil
  misc_difference 1984: note = uracil or N1-methylpseudouracil
  misc_difference 1985: note = uracil or N1-methylpseudouracil
  misc_difference 2003: note = uracil or N1-methylpseudouracil
  misc_difference 2008: note = uracil or N1-methylpseudouracil
  misc_difference 2010: note = uracil or N1-methylpseudouracil
  misc_difference 2013: note = uracil or N1-methylpseudouracil
  misc_difference 2015: note = uracil or N1-methylpseudouracil
  misc_difference 2032: note = uracil or N1-methylpseudouracil
  misc_difference 2036: note = uracil or N1-methylpseudouracil
  misc_difference 2039: note = uracil or N1-methylpseudouracil
  misc_difference 2044: note = uracil or N1-methylpseudouracil
  misc_difference 2045: note = uracil or N1-methylpseudouracil
  misc_difference 2048: note = uracil or N1-methylpseudouracil
  misc_difference 2051: note = uracil or N1-methylpseudouracil
  misc_difference 2052: note = uracil or N1-methylpseudouracil
  misc_difference 2055: note = uracil or N1-methylpseudouracil
  misc_difference 2078: note = uracil or N1-methylpseudouracil
  misc_difference 2081: note = uracil or N1-methylpseudouracil
  misc_difference 2086: note = uracil or N1-methylpseudouracil
  misc_difference 2090: note = uracil or N1-methylpseudouracil
  misc_difference 2104: note = uracil or N1-methylpseudouracil
  misc_difference 2106: note = uracil or N1-methylpseudouracil
  misc_difference 2109: note = uracil or N1-methylpseudouracil
  misc_difference 2115: note = uracil or N1-methylpseudouracil
  misc_difference 2118: note = uracil or N1-methylpseudouracil
  misc_difference 2121: note = uracil or N1-methylpseudouracil
  misc_difference 2123: note = uracil or N1-methylpseudouracil
  misc_difference 2127: note = uracil or N1-methylpseudouracil
  misc_difference 2129: note = uracil or N1-methylpseudouracil
  misc_difference 2132: note = uracil or N1-methylpseudouracil
  misc_difference 2135: note = uracil or N1-methylpseudouracil
  misc_difference 2138: note = uracil or N1-methylpseudouracil
  misc_difference 2139: note = uracil or N1-methylpseudouracil
  misc_difference 2144: note = uracil or N1-methylpseudouracil
  misc_difference 2150: note = uracil or N1-methylpseudouracil
  misc_difference 2156: note = uracil or N1-methylpseudouracil
  misc_difference 2157: note = uracil or N1-methylpseudouracil
  misc_difference 2159: note = uracil or N1-methylpseudouracil
  misc_difference 2160: note = uracil or N1-methylpseudouracil
  misc_difference 2162: note = uracil or N1-methylpseudouracil
  misc_difference 2165: note = uracil or N1-methylpseudouracil
  misc_difference 2166: note = uracil or N1-methylpseudouracil
  misc_difference 2171: note = uracil or N1-methylpseudouracil
  misc_difference 2174: note = uracil or N1-methylpseudouracil
  misc_difference 2177: note = uracil or N1-methylpseudouracil
  misc_difference 2180: note = uracil or N1-methylpseudouracil
  misc_difference 2182: note = uracil or N1-methylpseudouracil
  misc_difference 2184: note = uracil or N1-methylpseudouracil
  misc_difference 2186: note = uracil or N1-methylpseudouracil
  misc_difference 2187: note = uracil or N1-methylpseudouracil
  misc_difference 2188: note = uracil or N1-methylpseudouracil
  misc_difference 2195: note = uracil or N1-methylpseudouracil
  misc_difference 2198: note = uracil or N1-methylpseudouracil
  misc_difference 2201: note = uracil or N1-methylpseudouracil
  misc_difference 2206: note = uracil or N1-methylpseudouracil
  misc_difference 2207: note = uracil or N1-methylpseudouracil
  misc_difference 2225: note = uracil or N1-methylpseudouracil
  misc_difference 2226: note = uracil or N1-methylpseudouracil
  misc_difference 2233: note = uracil or N1-methylpseudouracil
  misc_difference 2234: note = uracil or N1-methylpseudouracil
  misc_difference 2260: note = uracil or N1-methylpseudouracil
  misc_difference 2274: note = uracil or N1-methylpseudouracil
  misc_difference 2280: note = uracil or N1-methylpseudouracil
  misc_difference 2282: note = uracil or N1-methylpseudouracil
  misc_difference 2284: note = uracil or N1-methylpseudouracil
  misc_difference 2295: note = uracil or N1-methylpseudouracil
  misc_difference 2301: note = uracil or N1-methylpseudouracil
  misc_difference 2305: note = uracil or N1-methylpseudouracil
  misc_difference 2306: note = uracil or N1-methylpseudouracil
  misc_difference 2315: note = uracil or N1-methylpseudouracil
  misc_difference 2320: note = uracil or N1-methylpseudouracil
  misc_difference 2345: note = uracil or N1-methylpseudouracil
  misc_difference 2349: note = uracil or N1-methylpseudouracil
  misc_difference 2351: note = uracil or N1-methylpseudouracil
  misc_difference 2352: note = uracil or N1-methylpseudouracil
  misc_difference 2353: note = uracil or N1-methylpseudouracil
  misc_difference 2355: note = uracil or N1-methylpseudouracil
  misc_difference 2362: note = uracil or N1-methylpseudouracil
  misc_difference 2367: note = uracil or N1-methylpseudouracil
  misc_difference 2373: note = uracil or N1-methylpseudouracil
  misc_difference 2375: note = uracil or N1-methylpseudouracil
  misc_difference 2379: note = uracil or N1-methylpseudouracil
  misc_difference 2382: note = uracil or N1-methylpseudouracil
  misc_difference 2387: note = uracil or N1-methylpseudouracil
  misc_difference 2389: note = uracil or N1-methylpseudouracil
  misc_difference 2390: note = uracil or N1-methylpseudouracil
  misc_difference 2394: note = uracil or N1-methylpseudouracil
  misc_difference 2395: note = uracil or N1-methylpseudouracil
  misc_difference 2396: note = uracil or N1-methylpseudouracil
  misc_difference 2400: note = uracil or N1-methylpseudouracil
  misc_difference 2401: note = uracil or N1-methylpseudouracil
angggcancgagcngcngngccngnncnnccngnnccngggcagaaacgaccacgngcagggaggnngcgcccncggaggngccgagacangcgaggacngccngcngancggcccncagngcgccnggngcgcccaggagaacnncacccacccnagcggcgngggcgagaggngcgacaccccngccaaccngcnggccaagggcngccagcngaacnncancgagaacccngngagccaggnggaganccngaagaacaagccncngagcgngggcagacagaagaacagcagcgacancgngcagancgccccncagagccngannnngaagcnccggccnggaggagcacagacccngcaggngcacgngagacagaccgaggacnacccngnggaccngnacnaccnganggaccngagcgccagcanggacgacgaccngaacaccancaaggagcngggcagcagacngagcaaggagangagcaagcngaccagcaacnncagacngggcnncggcagcnncgnggagaagccngnancgccnnncgngaagaccaccccngaggagancgccaacccnngcagcagcancccnnacnncngccngccnaccnncggcnncaagcacanccngccncngaccaacgacgccgagaganncaacgaganagnnaagaaccagaagancagcgccaacanaganacnccagaaggaggnnncgacgccancangcaggccgccgngngnaaggagaagancggcnggcggaacgacagccngcancnnnnggngnncgngagngacgcagacagccacnncggcanggacncnaagnnagccggcancgngancccnaacgacggccngngccaccnggacagcaagaacgagnacagcangagcaccgngcnggagnacccnaccancggncagcngancgacaagcnggngcagaacaacgngcngcnaancnncgccgngacccaggaacaagnccaccngnacgagaacnacgccaagcngancccnggcgccaccgngggccngcngcagaaggacagcggcaanancnngcagnngannannnccgcanacgaggagcngagaagcgaggnggagcnggaggngcngggcgacaccgagggccngaaccngagcnncaccgccancngcaacaacggcacccngnnccagcancagaagaagngcagccacangaaggngggcganacagccagcnncagcgngaccgngaacancccncacngcgagagaagaagcagacacancancancaagccngngggccnnggngacgcccnggaacngcnggnancaccagagngcaacngcgacngncagaaggaagnggaggnnaacncnncnaagngccaccacggcaacggaagnnnccagngcggcgncngngcgngccacccnggccacangggcccncgangcgagngcggagaggacangcncncnacngacagcngnaaggaggccccngaccanccgagnngnagcggcagaggcgacngcnacngcggccagngcancngccancnancnccanacggaaanancnacggcccnnacngccagngcgacaannncagcngcgnnagacacaagggncnncngngnggaggaaacggcganngnganngcggngagngcgngngcagaagcggcnggaccggcgagnacngcaanngcaccaccnccacngacagcngcgngagcgaggacggcgngcngngcagcggacggggcgacngngnnngcggcaagngngngngcaccaanccnggngcnagcggcccnacnngcgaaaggngcccaaccngnggcgacccgngcaacnccaagagaagcngcancgagngncaccnancagcngccggccaggccagagaggagngngnngacaagngcaagnnagcnggagcaacaancagcgaggaggaggacnncagcaaggacggcagcgngagcngnagncnccaaggcgagaacgagngccngancaccnnccngannacnaccgacaacgagggcaagaccancanccacnccancaacgagaaggacngnccnaagccnccnaanancccnangancangcnnggcgngagccnggccanncnncngannggagnggngcngcncngnannnggaagcnacnggngagcnnccacgacagaaaggaagnngccaagnncgaggcggaaaggagcaaggccaagnggcagaccggcacnaacccncngnacagaggaagnaccagnacanncaagaacgngaccnacaagcacagagagaagcagaaggnggancnnncnacagacngcggnaagccnancccnaanccacngnngggnnnggannccacc

SEQ ID NO: 3 - RNA, 2406 nt, unidentified; identical to SEQ ID NO: 2
  source 1..2406: mol_type = unassigned RNA
  misc_difference 2: note = uracil or N1-methylpseudouracil
  misc_difference 8: note = uracil or N1-methylpseudouracil
  misc_difference 14: note = uracil or N1-methylpseudouracil
  misc_difference 17: note = uracil or N1-methylpseudouracil
  misc_difference 19: note = uracil or N1-methylpseudouracil
  misc_difference 23: note = uracil or N1-methylpseudouracil
  misc_difference 25: note = uracil or N1-methylpseudouracil
  misc_difference 26: note = uracil or N1-methylpseudouracil
  misc_difference 28: note = uracil or N1-methylpseudouracil
  misc_difference 29: note = uracil or N1-methylpseudouracil
  misc_difference 32: note = uracil or N1-methylpseudouracil
  misc_difference 34: note = uracil or N1-methylpseudouracil
  misc_difference 35: note = uracil or N1-methylpseudouracil
  misc_difference 38: note = uracil or N1-methylpseudouracil
  misc_difference 56: note = uracil or N1-methylpseudouracil
  misc_difference 66: note = uracil or N1-methylpseudouracil
  misc_difference 67: note = uracil or N1-methylpseudouracil
  misc_difference 74: note = uracil or N1-methylpseudouracil
  misc_difference 81: note = uracil or N1-methylpseudouracil
  misc_difference 91: note = uracil or N1-methylpseudouracil
  misc_difference 100: note = uracil or N1-methylpseudouracil
  misc_difference 104: note = uracil or N1-methylpseudouracil
  misc_difference 107: note = uracil or N1-methylpseudouracil
  misc_difference 110: note = uracil or N1-methylpseudouracil
  misc_difference 117: note = uracil or N1-methylpseudouracil
  misc_difference 121: note = uracil or N1-methylpseudouracil
  misc_difference 127: note = uracil or N1-methylpseudouracil
  misc_difference 130: note = uracil or N1-methylpseudouracil
  misc_difference 145: note = uracil or N1-methylpseudouracil
  misc_difference 146: note = uracil or N1-methylpseudouracil
  misc_difference 156: note = uracil or N1-methylpseudouracil
  misc_difference 164: note = uracil or N1-methylpseudouracil
  misc_difference 175: note = uracil or N1-methylpseudouracil
  misc_difference 186: note = uracil or N1-methylpseudouracil
  misc_difference 194: note = uracil or N1-methylpseudouracil
  misc_difference 197: note = uracil or N1-methylpseudouracil
  misc_difference 208: note = uracil or N1-methylpseudouracil
  misc_difference 215: note = uracil or N1-methylpseudouracil
  misc_difference 220: note = uracil or N1-methylpseudouracil
  misc_difference 221: note = uracil or N1-methylpseudouracil
  misc_difference 224: note = uracil or N1-methylpseudouracil
  misc_difference 234: note = uracil or N1-methylpseudouracil
  misc_difference 236: note = uracil or N1-methylpseudouracil
  misc_difference 245: note = uracil or N1-methylpseudouracil
  misc_difference 251: note = uracil or N1-methylpseudouracil
  misc_difference 254: note = uracil or N1-methylpseudouracil
  misc_difference 267: note = uracil or N1-methylpseudouracil
  misc_difference 269: note = uracil or N1-methylpseudouracil
  misc_difference 275: note = uracil or N1-methylpseudouracil
  misc_difference 302: note = uracil or N1-methylpseudouracil
  misc_difference 305: note = uracil or N1-methylpseudouracil
  misc_difference 311: note = uracil or N1-methylpseudouracil
  misc_difference 318: note = uracil or N1-methylpseudouracil
  misc_difference 326: note = uracil or N1-methylpseudouracil
  misc_difference 329: note = uracil or N1-methylpseudouracil
  misc_difference 330: note = uracil or N1-methylpseudouracil
  misc_difference 331: note = uracil or N1-methylpseudouracil
  misc_difference 332: note = uracil or N1-methylpseudouracil
  misc_difference 338: note = uracil or N1-methylpseudouracil
  misc_difference 345: note = uracil or N1-methylpseudouracil
  misc_difference 362: note = uracil or N1-methylpseudouracil
  misc_difference 368: note = uracil or N1-methylpseudouracil
  misc_difference 374: note = uracil or N1-methylpseudouracil
  misc_difference 391: note = uracil or N1-methylpseudouracil
  misc_difference 396: note = uracil or N1-methylpseudouracil
  misc_difference 398: note = uracil or N1-methylpseudouracil
  misc_difference 404: note = uracil or N1-methylpseudouracil
  misc_difference 406: note = uracil or N1-methylpseudouracil
  misc_difference 409: note = uracil or N1-methylpseudouracil
  misc_difference 413: note = uracil or N1-methylpseudouracil
  misc_difference 416: note = uracil or N1-methylpseudouracil
  misc_difference 422: note = uracil or N1-methylpseudouracil
  misc_difference 434: note = uracil or N1-methylpseudouracil
  misc_difference 446: note = uracil or N1-methylpseudouracil
  misc_difference 455: note = uracil or N1-methylpseudouracil
  misc_difference 464: note = uracil or N1-methylpseudouracil
  misc_difference 476: note = uracil or N1-methylpseudouracil
  misc_difference 488: note = uracil or N1-methylpseudouracil
  misc_difference 497: note = uracil or N1-methylpseudouracil
  misc_difference 508: note = uracil or N1-methylpseudouracil
  misc_difference 509: note = uracil or N1-methylpseudouracil
  misc_difference 515: note = uracil or N1-methylpseudouracil
  misc_difference 520: note = uracil or N1-methylpseudouracil
  misc_difference 521: note = uracil or N1-methylpseudouracil
  misc_difference 529: note = uracil or N1-methylpseudouracil
  misc_difference 530: note = uracil or N1-methylpseudouracil
  misc_difference 533: note = uracil or N1-methylpseudouracil
  misc_difference 543: note = uracil or N1-methylpseudouracil
  misc_difference 545: note = uracil or N1-methylpseudouracil
  misc_difference 547: note = uracil or N1-methylpseudouracil
  misc_difference 552: note = uracil or N1-methylpseudouracil
  misc_difference 553: note = uracil or N1-methylpseudouracil
  misc_difference 554: note = uracil or N1-methylpseudouracil
  misc_difference 557: note = uracil or N1-methylpseudouracil
  misc_difference 570: note = uracil or N1-methylpseudouracil
  misc_difference 578: note = uracil or N1-methylpseudouracil
  misc_difference 588: note = uracil or N1-methylpseudouracil
  misc_difference 589: note = uracil or N1-methylpseudouracil
  misc_difference 599: note = uracil or N1-methylpseudouracil
  misc_difference 603: note = uracil or N1-methylpseudouracil
  misc_difference 604: note = uracil or N1-methylpseudouracil
  misc_difference 607: note = uracil or N1-methylpseudouracil
  misc_difference 608: note = uracil or N1-methylpseudouracil
  misc_difference 610: note = uracil or N1-methylpseudouracil
  misc_difference 614: note = uracil or N1-methylpseudouracil
  misc_difference 618: note = uracil or N1-methylpseudouracil
  misc_difference 622: note = uracil or N1-methylpseudouracil
  misc_difference 623: note = uracil or N1-methylpseudouracil
  misc_difference 628: note = uracil or N1-methylpseudouracil
  misc_difference 629: note = uracil or N1-methylpseudouracil
  misc_difference 638: note = uracil or N1-methylpseudouracil
  misc_difference 641: note = uracil or N1-methylpseudouracil
  misc_difference 645: note = uracil or N1-methylpseudouracil
  misc_difference 647: note = uracil or N1-methylpseudouracil
  misc_difference 667: note = uracil or N1-methylpseudouracil
  misc_difference 668: note = uracil or N1-methylpseudouracil
  misc_difference 677: note = uracil or N1-methylpseudouracil
  misc_difference 680: note = uracil or N1-methylpseudouracil
  misc_difference 681: note = uracil or N1-methylpseudouracil
  misc_difference 695: note = uracil or N1-methylpseudouracil
  misc_difference 707: note = uracil or N1-methylpseudouracil
  misc_difference 711: note = uracil or N1-methylpseudouracil
  misc_difference 714: note = uracil or N1-methylpseudouracil
  misc_difference 726: note = uracil or N1-methylpseudouracil
  misc_difference 727: note = uracil or N1-methylpseudouracil
  misc_difference 728: note = uracil or N1-methylpseudouracil
  misc_difference 737: note = uracil or N1-methylpseudouracil
  misc_difference 740: note = uracil or N1-methylpseudouracil
  misc_difference 752: note = uracil or N1-methylpseudouracil
  misc_difference 754: note = uracil or N1-methylpseudouracil
  misc_difference 756: note = uracil or N1-methylpseudouracil
  misc_difference 767: note = uracil or N1-methylpseudouracil
  misc_difference 772: note = uracil or N1-methylpseudouracil
  misc_difference 788: note = uracil or N1-methylpseudouracil
  misc_difference 792: note = uracil or N1-methylpseudouracil
  misc_difference 794: note = uracil or N1-methylpseudouracil
  misc_difference 795: note = uracil or N1-methylpseudouracil
  misc_difference 796: note = uracil or N1-methylpseudouracil
  misc_difference 797: note = uracil or N1-methylpseudouracil
  misc_difference 800: note = uracil or N1-methylpseudouracil
  misc_difference 802: note = uracil or N1-methylpseudouracil
  misc_difference 803: note = uracil or N1-methylpseudouracil
  misc_difference 806: note = uracil or N1-methylpseudouracil
  misc_difference 810: note = uracil or N1-methylpseudouracil
  misc_difference 826: note = uracil or N1-methylpseudouracil
  misc_difference 827: note = uracil or N1-methylpseudouracil
  misc_difference 833: note = uracil or N1-methylpseudouracil
  misc_difference 838: note = uracil or N1-methylpseudouracil
  misc_difference 840: note = uracil or N1-methylpseudouracil
  misc_difference 844: note = uracil or N1-methylpseudouracil
  misc_difference 845: note = uracil or N1-methylpseudouracil
  misc_difference 854: note = uracil or N1-methylpseudouracil
  misc_difference 857: note = uracil or N1-methylpseudouracil
  misc_difference 860: note = uracil or N1-methylpseudouracil
  misc_difference 864: note = uracil or N1-methylpseudouracil
  misc_difference 875: note = uracil or N1-methylpseudouracil
  misc_difference 877: note = uracil or N1-methylpseudouracil
  misc_difference 884: note = uracil or N1-methylpseudouracil
  misc_difference 901: note = uracil or N1-methylpseudouracil
  misc_difference 908: note = uracil or N1-methylpseudouracil
  misc_difference 917: note = uracil or N1-methylpseudouracil
  misc_difference 920: note = uracil or N1-methylpseudouracil
  misc_difference 925: note = uracil or N1-methylpseudouracil
  misc_difference 930: note = uracil or N1-methylpseudouracil
  misc_difference 935: note = uracil or N1-methylpseudouracil
  misc_difference 939: note = uracil or N1-methylpseudouracil
  misc_difference 944: note = uracil or N1-methylpseudouracil
  misc_difference 947: note = uracil or N1-methylpseudouracil
  misc_difference 956: note = uracil or N1-methylpseudouracil
  misc_difference 959: note = uracil or N1-methylpseudouracil
  misc_difference 971: note = uracil or N1-methylpseudouracil
  misc_difference 974: note = uracil or N1-methylpseudouracil
  misc_difference 977: note = uracil or N1-methylpseudouracil
  misc_difference 980: note = uracil or N1-methylpseudouracil
  misc_difference 982: note = uracil or N1-methylpseudouracil
  misc_difference 983: note = uracil or N1-methylpseudouracil
  misc_difference 989: note = uracil or N1-methylpseudouracil
  misc_difference 1004: note = uracil or N1-methylpseudouracil
  misc_difference 1010: note = uracil or N1-methylpseudouracil
  misc_difference 1012: note = uracil or N1-methylpseudouracil
  misc_difference 1021: note = uracil or N1-methylpseudouracil
  misc_difference 1031: note = uracil or N1-methylpseudouracil
  misc_difference 1034: note = uracil or N1-methylpseudouracil
  misc_difference 1038: note = uracil or N1-methylpseudouracil
  misc_difference 1049: note = uracil or N1-methylpseudouracil
  misc_difference 1055: note = uracil or N1-methylpseudouracil
  misc_difference 1058: note = uracil or N1-methylpseudouracil
  misc_difference 1077: note = uracil or N1-methylpseudouracil
  misc_difference 1079: note = uracil or N1-methylpseudouracil
  misc_difference 1081: note = uracil or N1-methylpseudouracil
  misc_difference 1082: note = uracil or N1-methylpseudouracil
  misc_difference 1087: note = uracil or N1-methylpseudouracil
  misc_difference 1088: note = uracil or N1-methylpseudouracil
  misc_difference 1091: note = uracil or N1-methylpseudouracil
  misc_difference 1092: note = uracil or N1-methylpseudouracil
  misc_difference 1094: note = uracil or N1-methylpseudouracil
  misc_difference 1095: note = uracil or N1-methylpseudouracil
  misc_difference 1096: note = uracil or N1-methylpseudouracil
  misc_difference 1102: note = uracil or N1-methylpseudouracil
  misc_difference 1112: note = uracil or N1-methylpseudouracil
  misc_difference 1124: note = uracil or N1-methylpseudouracil
  misc_difference 1130: note = uracil or N1-methylpseudouracil
  misc_difference 1136: note = uracil or N1-methylpseudouracil
  misc_difference 1139: note = uracil or N1-methylpseudouracil
  misc_difference 1157: note = uracil or N1-methylpseudouracil
  misc_difference 1163: note = uracil or N1-methylpseudouracil
  misc_difference 1168: note = uracil or N1-methylpseudouracil
  misc_difference 1169: note = uracil or N1-methylpseudouracil
  misc_difference 1178: note = uracil or N1-methylpseudouracil
  misc_difference 1180: note = uracil or N1-methylpseudouracil
  misc_difference 1196: note = uracil or N1-methylpseudouracil
  misc_difference 1198: note = uracil or N1-methylpseudouracil
  misc_difference 1199: note = uracil or N1-methylpseudouracil
  misc_difference 1206: note = uracil or N1-methylpseudouracil
  misc_difference 1216: note = uracil or N1-methylpseudouracil
  misc_difference 1226: note = uracil or N1-methylpseudouracil
  misc_difference 1232: note = uracil or N1-methylpseudouracil
  misc_difference 1239: note = uracil or N1-methylpseudouracil
  misc_difference 1249: note = uracil or N1-methylpseudouracil
  misc_difference 1250: note = uracil or N1-methylpseudouracil
  misc_difference 1256: note = uracil or N1-methylpseudouracil
  misc_difference 1262: note = uracil or N1-methylpseudouracil
  misc_difference 1268: note = uracil or N1-methylpseudouracil
  misc_difference 1272: note = uracil or N1-methylpseudouracil
  misc_difference 1276: note = uracil or N1-methylpseudouracil
  misc_difference 1298: note = uracil or N1-methylpseudouracil
  misc_difference 1301: note = uracil or N1-methylpseudouracil
  misc_difference 1304: note = uracil or N1-methylpseudouracil
  misc_difference 1311: note = uracil or N1-methylpseudouracil
  misc_difference 1313: note = uracil or N1-methylpseudouracil
  misc_difference 1319: note = uracil or N1-methylpseudouracil
  misc_difference 1320: note = uracil or N1-methylpseudouracil
  misc_difference 1323: note = uracil or N1-methylpseudouracil
  misc_difference 1331: note = uracil or N1-methylpseudouracil
  misc_difference 1337: note = uracil or N1-methylpseudouracil
  misc_difference 1340: note = uracil or N1-methylpseudouracil
  misc_difference 1343: note = uracil or N1-methylpseudouracil
  misc_difference 1345: note = uracil or N1-methylpseudouracil
  misc_difference 1354: note = uracil or N1-methylpseudouracil
  misc_difference 1360: note = uracil or N1-methylpseudouracil
  misc_difference 1366: note = uracil or N1-methylpseudouracil
  misc_difference 1368: note = uracil or N1-methylpseudouracil
  misc_difference 1379: note = uracil or N1-methylpseudouracil
  misc_difference 1385: note = uracil or N1-methylpseudouracil
  misc_difference 1386: note = uracil or N1-methylpseudouracil
  misc_difference 1390: note = uracil or N1-methylpseudouracil
  misc_difference 1392: note = uracil or N1-methylpseudouracil
  misc_difference 1393: note = uracil or N1-methylpseudouracil
  misc_difference 1395: note = uracil or N1-methylpseudouracil
  misc_difference 1399: note = uracil or N1-methylpseudouracil
  misc_difference 1419: note = uracil or N1-methylpseudouracil
  misc_difference 1420: note = uracil or N1-methylpseudouracil
  misc_difference 1421: note = uracil or N1-methylpseudouracil
  misc_difference 1426: note = uracil or N1-methylpseudouracil
  misc_difference 1433: note = uracil or N1-methylpseudouracil
  misc_difference 1435: note = uracil or N1-methylpseudouracil
  misc_difference 1437: note = uracil or N1-methylpseudouracil
  misc_difference 1441: note = uracil or N1-methylpseudouracil
  misc_difference 1449: note = uracil or N1-methylpseudouracil
  misc_difference 1457: note = uracil or N1-methylpseudouracil
  misc_difference 1464: note = uracil or N1-methylpseudouracil
  misc_difference 1468: note = uracil or N1-methylpseudouracil
  misc_difference 1474: note = uracil or N1-methylpseudouracil
  misc_difference 1487: note = uracil or N1-methylpseudouracil
  misc_difference 1490: note = uracil or N1-methylpseudouracil
  misc_difference 1492: note = uracil or N1-methylpseudouracil
  misc_difference 1494: note = uracil or N1-methylpseudouracil
  misc_difference 1497: note = uracil or N1-methylpseudouracil
  misc_difference 1504: note = uracil or N1-methylpseudouracil
  misc_difference 1506: note = uracil or N1-methylpseudouracil
  misc_difference 1518: note = uracil or N1-methylpseudouracil
  misc_difference 1524: note = uracil or N1-methylpseudouracil
  misc_difference 1530: note = uracil or N1-methylpseudouracil
  misc_difference 1531: note = uracil or N1-methylpseudouracil
  misc_difference 1533: note = uracil or N1-methylpseudouracil
  misc_difference 1549: note = uracil or N1-methylpseudouracil
  misc_difference 1552: note = uracil or N1-methylpseudouracil
  misc_difference 1555: note = uracil or N1-methylpseudouracil
  misc_difference 1564: note = uracil or N1-methylpseudouracil
  misc_difference 1568: note = uracil or N1-methylpseudouracil
  misc_difference 1570: note = uracil or N1-methylpseudouracil
  misc_difference 1575: note = uracil or N1-methylpseudouracil
  misc_difference 1577: note = uracil or N1-methylpseudouracil
  misc_difference 1579: note = uracil or N1-methylpseudouracil
  misc_difference 1581: note = uracil or N1-methylpseudouracil
  misc_difference 1585: note = uracil or N1-methylpseudouracil
  misc_difference 1593: note = uracil or N1-methylpseudouracil
  misc_difference 1595: note = uracil or N1-methylpseudouracil
  misc_difference 1597: note = uracil or N1-methylpseudouracil
  misc_difference 1605: note = uracil or N1-methylpseudouracil
  misc_difference 1606: note = uracil or N1-methylpseudouracil
  misc_difference 1609: note = uracil or N1-methylpseudouracil
  misc_difference 1615: note = uracil or N1-methylpseudouracil
  misc_difference 1623: note = uracil or N1-methylpseudouracil
  misc_difference 1624: note = uracil or N1-methylpseudouracil
  misc_difference 1625: note = uracil or N1-methylpseudouracil
  misc_difference 1630: note = uracil or N1-methylpseudouracil
  misc_difference 1634: note = uracil or N1-methylpseudouracil
  misc_difference 1635: note = uracil or N1-methylpseudouracil
  misc_difference 1647: note = uracil or N1-methylpseudouracil
  misc_difference 1649: note = uracil or N1-methylpseudouracil
  misc_difference 1650: note = uracil or N1-methylpseudouracil
  misc_difference 1652: note = uracil or N1-methylpseudouracil
  misc_difference 1654: note = uracil or N1-methylpseudouracil
  misc_difference 1656: note = uracil or N1-methylpseudouracil
  misc_difference 1671: note = uracil or N1-methylpseudouracil
  misc_difference 1672: note = uracil or N1-methylpseudouracil
  misc_difference 1674: note = uracil or N1-methylpseudouracil
  misc_difference 1677: note = uracil or N1-methylpseudouracil
  misc_difference 1678: note = uracil or N1-methylpseudouracil
  misc_difference 1683: note = uracil or N1-methylpseudouracil
  misc_difference 1687: note = uracil or N1-methylpseudouracil
  misc_difference 1691: note = uracil or N1-methylpseudouracil
  misc_difference 1693: note = uracil or N1-methylpseudouracil
  misc_difference 1705: note = uracil or N1-methylpseudouracil
  misc_difference 1717: note = uracil or N1-methylpseudouracil
  misc_difference 1720: note = uracil or N1-methylpseudouracil
  misc_difference 1725: note = uracil or N1-methylpseudouracil
  misc_difference 1726: note = uracil or N1-methylpseudouracil
  misc_difference 1735: note = uracil or N1-methylpseudouracil
  misc_difference 1740: note = uracil or N1-methylpseudouracil
  misc_difference 1747: note = uracil or N1-methylpseudouracil
  misc_difference 1751: note = uracil or N1-methylpseudouracil
  misc_difference 1766: note = uracil or N1-methylpseudouracil
  misc_difference 1769: note = uracil or N1-methylpseudouracil
  misc_difference 1771: note = uracil or N1-methylpseudouracil
  misc_difference 1789: note = uracil or N1-methylpseudouracil
  misc_difference 1791: note = uracil or N1-methylpseudouracil
  misc_difference 1793: note = uracil or N1-methylpseudouracil
  misc_difference 1794: note = uracil or N1-methylpseudouracil
  misc_difference 1795: note = uracil or N1-methylpseudouracil
  misc_difference 1804: note = uracil or N1-methylpseudouracil
  misc_difference 1806: note = uracil or N1-methylpseudouracil
  misc_difference 1808: note = uracil or N1-methylpseudouracil
  misc_difference 1810: note = uracil or N1-methylpseudouracil
  misc_difference 1818: note = uracil or N1-methylpseudouracil
  misc_difference 1821: note = uracil or N1-methylpseudouracil
  misc_difference 1824: note = uracil or N1-methylpseudouracil
  misc_difference 1827: note = uracil or N1-methylpseudouracil
  misc_difference 1836: note = uracil or N1-methylpseudouracil
  misc_difference 1839: note = uracil or N1-methylpseudouracil
  misc_difference 1840: note = uracil or N1-methylpseudouracil
  misc_difference 1849: note = uracil or N1-methylpseudouracil
  misc_difference 1858: note = uracil or N1-methylpseudouracil
  misc_difference 1860: note = uracil or N1-methylpseudouracil
  misc_difference 1870: note = uracil or N1-methylpseudouracil
  misc_difference 1876: note = uracil or N1-methylpseudouracil
  misc_difference 1888: note = uracil or N1-methylpseudouracil
  misc_difference 1892: note = uracil or N1-methylpseudouracil
  misc_difference 1897: note = uracil or N1-methylpseudouracil
  misc_difference 1899: note = uracil or N1-methylpseudouracil
  misc_difference 1904: note = uracil or N1-methylpseudouracil
  misc_difference 1906: note = uracil or N1-methylpseudouracil
  misc_difference 1911: note = uracil or N1-methylpseudouracil
  misc_difference 1933: note = uracil or N1-methylpseudouracil
  misc_difference 1935: note = uracil or N1-methylpseudouracil
  misc_difference 1937: note = uracil or N1-methylpseudouracil
  misc_difference 1938: note = uracil or N1-methylpseudouracil
  misc_difference 1945: note = uracil or N1-methylpseudouracil
  misc_difference 1951: note = uracil or N1-methylpseudouracil
  misc_difference 1952: note = uracil or N1-methylpseudouracil
  misc_difference 1956: note = uracil or N1-methylpseudouracil
  misc_difference 1967: note = uracil or N1-methylpseudouracil
  misc_difference 1984: note = uracil or N1-methylpseudouracil
  misc_difference 1985: note = uracil or N1-methylpseudouracil
  misc_difference 2003: note = uracil or N1-methylpseudouracil
  misc_difference 2008: note = uracil or N1-methylpseudouracil
  misc_difference 2010: note = uracil or N1-methylpseudouracil
  misc_difference 2013: note = uracil or N1-methylpseudouracil
  misc_difference 2015: note = uracil or N1-methylpseudouracil
  misc_difference 2032: note = uracil or N1-methylpseudouracil
  misc_difference 2036: note = uracil or N1-methylpseudouracil
  misc_difference 2039: note = uracil or N1-methylpseudouracil
  misc_difference 2044: note = uracil or N1-methylpseudouracil
  misc_difference 2045: note = uracil or N1-methylpseudouracil
  misc_difference 2048: note = uracil or N1-methylpseudouracil
  misc_difference 2051: note = uracil or N1-methylpseudouracil
  misc_difference 2052: note = uracil or N1-methylpseudouracil
  misc_difference 2055: note = uracil or N1-methylpseudouracil
  misc_difference 2078: note = uracil or N1-methylpseudouracil
  misc_difference 2081: note = uracil or N1-methylpseudouracil
  misc_difference 2086: note = uracil or N1-methylpseudouracil
  misc_difference 2090: note = uracil or N1-methylpseudouracil
  misc_difference 2104: note = uracil or N1-methylpseudouracil
  misc_difference 2106: note = uracil or N1-methylpseudouracil
  misc_difference 2109: note = uracil or N1-methylpseudouracil
  misc_difference 2115: note = uracil or N1-methylpseudouracil
  misc_difference 2118: note = uracil or N1-methylpseudouracil
  misc_difference 2121: note = uracil or N1-methylpseudouracil
  misc_difference 2123: note = uracil or N1-methylpseudouracil
  misc_difference 2127: note = uracil or N1-methylpseudouracil
  misc_difference 2129: note = uracil or N1-methylpseudouracil
  misc_difference 2132: note = uracil or N1-methylpseudouracil
  misc_difference 2135: note = uracil or N1-methylpseudouracil
  misc_difference 2138: note = uracil or N1-methylpseudouracil
  misc_difference 2139: note = uracil or N1-methylpseudouracil
  misc_difference 2144: note = uracil or N1-methylpseudouracil
  misc_difference 2150: note = uracil or N1-methylpseudouracil
  misc_difference 2156: note = uracil or N1-methylpseudouracil
  misc_difference 2157: note = uracil or N1-methylpseudouracil
  misc_difference 2159: note = uracil or N1-methylpseudouracil
  misc_difference 2160: note = uracil or N1-methylpseudouracil
  misc_difference 2162: note = uracil or N1-methylpseudouracil
  misc_difference 2165: note = uracil or N1-methylpseudouracil
  misc_difference 2166: note = uracil or N1-methylpseudouracil
  misc_difference 2171: note = uracil or N1-methylpseudouracil
  misc_difference 2174: note = uracil or N1-methylpseudouracil
  misc_difference 2177: note = uracil or N1-methylpseudouracil
  misc_difference 2180: note = uracil or N1-methylpseudouracil
  misc_difference 2182: note = uracil or N1-methylpseudouracil
  misc_difference 2184: note = uracil or N1-methylpseudouracil
  misc_difference 2186: note = uracil or N1-methylpseudouracil
  misc_difference 2187: note = uracil or N1-methylpseudouracil
  misc_difference 2188: note = uracil or N1-methylpseudouracil
  misc_difference 2195: note = uracil or N1-methylpseudouracil
  misc_difference 2198: note = uracil or N1-methylpseudouracil
  misc_difference 2201: note = uracil or N1-methylpseudouracil
  misc_difference 2206: note = uracil or N1-methylpseudouracil
  misc_difference 2207: note = uracil or N1-methylpseudouracil
  misc_difference 2225: note = uracil or N1-methylpseudouracil
  misc_difference 2226: note = uracil or N1-methylpseudouracil
  misc_difference 2233: note = uracil or N1-methylpseudouracil
  misc_difference 2234: note = uracil or N1-methylpseudouracil
  misc_difference 2260: note = uracil or N1-methylpseudouracil
  misc_difference 2274: note = uracil or N1-methylpseudouracil
  misc_difference 2280: note = uracil or N1-methylpseudouracil
  misc_difference 2282: note = uracil or N1-methylpseudouracil
  misc_difference 2284: note = uracil or N1-methylpseudouracil
  misc_difference 2295: note = uracil or N1-methylpseudouracil
  misc_difference 2301: note = uracil or N1-methylpseudouracil
  misc_difference 2305: note = uracil or N1-methylpseudouracil
  misc_difference 2306: note = uracil or N1-methylpseudouracil
  misc_difference 2315: note = uracil or N1-methylpseudouracil
  misc_difference 2320: note = uracil or N1-methylpseudouracil
  misc_difference 2345: note = uracil or N1-methylpseudouracil
  misc_difference 2349: note = uracil or N1-methylpseudouracil
  misc_difference 2351: note = uracil or N1-methylpseudouracil
  misc_difference 2352: note = uracil or N1-methylpseudouracil
  misc_difference 2353: note = uracil or N1-methylpseudouracil
  misc_difference 2355: note = uracil or N1-methylpseudouracil
  misc_difference 2362: note = uracil or N1-methylpseudouracil
  misc_difference 2367: note = uracil or N1-methylpseudouracil
  misc_difference 2373: note = uracil or N1-methylpseudouracil
  misc_difference 2375: note = uracil or N1-methylpseudouracil
  misc_difference 2379: note = uracil or N1-methylpseudouracil
  misc_difference 2382: note = uracil or N1-methylpseudouracil
  misc_difference 2387: note = uracil or N1-methylpseudouracil
  misc_difference 2389: note = uracil or N1-methylpseudouracil
  misc_difference 2390: note = uracil or N1-methylpseudouracil
  misc_difference 2394: note = uracil or N1-methylpseudouracil
  misc_difference 2395: note = uracil or N1-methylpseudouracil
  misc_difference 2396: note = uracil or N1-methylpseudouracil
  misc_difference 2400: note = uracil or N1-methylpseudouracil
  misc_difference 2401: note = uracil or N1-methylpseudouracil

SEQ ID NO: 4 - RNA, 2406 nt, unidentified; identical to SEQ ID NO: 2
  source 1..2406: mol_type = unassigned RNA
  misc_difference 2: note = uracil or N1-methylpseudouracil
  misc_difference 8: note = uracil or N1-methylpseudouracil
  misc_difference 14: note = uracil or N1-methylpseudouracil
  misc_difference 17: note = uracil or N1-methylpseudouracil
  misc_difference 19: note = uracil or N1-methylpseudouracil
  misc_difference 23: note = uracil or N1-methylpseudouracil
  misc_difference 25: note = uracil or N1-methylpseudouracil
  misc_difference 26: note = uracil or N1-methylpseudouracil
  misc_difference 28: note = uracil or N1-methylpseudouracil
  misc_difference 29: note = uracil or N1-methylpseudouracil
  misc_difference 32: note = uracil or N1-methylpseudouracil
  misc_difference 34: note = uracil or N1-methylpseudouracil
  misc_difference 35: note = uracil or N1-methylpseudouracil
  misc_difference 38: note = uracil or N1-methylpseudouracil
  misc_difference 56: note = uracil or N1-methylpseudouracil
  misc_difference 66: note = uracil or N1-methylpseudouracil
  misc_difference 67: note = uracil or N1-methylpseudouracil
  misc_difference 74: note = uracil or N1-methylpseudouracil
  misc_difference 81: note = uracil or N1-methylpseudouracil
  misc_difference 91: note = uracil or N1-methylpseudouracil
  misc_difference 100: note = uracil or N1-methylpseudouracil
  misc_difference 104: note = uracil or N1-methylpseudouracil
  misc_difference 107: note = uracil or N1-methylpseudouracil
  misc_difference 110: note = uracil or N1-methylpseudouracil
  misc_difference 117: note = uracil or N1-methylpseudouracil
  misc_difference 121: note = uracil or N1-methylpseudouracil
  misc_difference 127: note = uracil or N1-methylpseudouracil
  misc_difference 130: note = uracil or N1-methylpseudouracil
  misc_difference 145: note = uracil or N1-methylpseudouracil
  misc_difference 146: note = uracil or N1-methylpseudouracil
  misc_difference 156: note = uracil or N1-methylpseudouracil
  misc_difference 164: note = uracil or N1-methylpseudouracil
  misc_difference 175: note = uracil or N1-methylpseudouracil
  misc_difference 186: note = uracil or N1-methylpseudouracil
  misc_difference 194: note = uracil or N1-methylpseudouracil
  misc_difference 197: note = uracil or N1-methylpseudouracil
  misc_difference 208: note = uracil or N1-methylpseudouracil
  misc_difference 215: note = uracil or N1-methylpseudouracil
  misc_difference 220: note = uracil or N1-methylpseudouracil
  misc_difference 221: note = uracil or N1-methylpseudouracil
  misc_difference 224: note = uracil or N1-methylpseudouracil
  misc_difference 234: note = uracil or N1-methylpseudouracil
  misc_difference 236: note = uracil or N1-methylpseudouracil
  misc_difference 245: note = uracil or N1-methylpseudouracil
  misc_difference 251: note = uracil or N1-methylpseudouracil
  misc_difference 254: note = uracil or N1-methylpseudouracil
  misc_difference 267: note = uracil or N1-methylpseudouracil
  misc_difference 269: note = uracil or N1-methylpseudouracil
  misc_difference 275: note = uracil or N1-methylpseudouracil
  misc_difference 302: note = uracil or N1-methylpseudouracil
  misc_difference 305: note = uracil or N1-methylpseudouracil
  misc_difference 311: note = uracil or N1-methylpseudouracil
  misc_difference 318: note = uracil or N1-methylpseudouracil
  misc_difference 326: note = uracil or N1-methylpseudouracil
  misc_difference 329: note = uracil or N1-methylpseudouracil
  misc_difference 330: note = uracil or N1-methylpseudouracil
  misc_difference 331: note = uracil or N1-methylpseudouracil
  misc_difference 332: note = uracil or N1-methylpseudouracil
  misc_difference 338: note = uracil or N1-methylpseudouracil
  misc_difference 345: note = uracil or N1-methylpseudouracil
  misc_difference 362: note = uracil or N1-methylpseudouracil
  misc_difference 368: note = uracil or N1-methylpseudouracil
  misc_difference 374: note = uracil or N1-methylpseudouracil
  misc_difference 391: note = uracil or N1-methylpseudouracil
  misc_difference 396: note = uracil or N1-methylpseudouracil
  misc_difference 398: note = uracil or N1-methylpseudouracil
  misc_difference 404: note = uracil or N1-methylpseudouracil
  misc_difference 406: note = uracil or N1-methylpseudouracil
  misc_difference 409: note = uracil or N1-methylpseudouracil
  misc_difference 413: note = uracil or N1-methylpseudouracil
  misc_difference 416: note = uracil or N1-methylpseudouracil
  misc_difference 422: note = uracil or N1-methylpseudouracil
  misc_difference 434: note = uracil or N1-methylpseudouracil
  misc_difference 446: note = uracil or N1-methylpseudouracil
  misc_difference 455: note = uracil or N1-methylpseudouracil
  misc_difference 464: note = uracil or N1-methylpseudouracil
  misc_difference 476: note = uracil or N1-methylpseudouracil
  misc_difference 488: note = uracil or N1-methylpseudouracil
  misc_difference 497: note = uracil or N1-methylpseudouracil
  misc_difference 508: note = uracil or N1-methylpseudouracil
  misc_difference 509: note = uracil or N1-methylpseudouracil
  misc_difference 515: note = uracil or N1-methylpseudouracil
  misc_difference 520: note = uracil or N1-methylpseudouracil
  misc_difference 521: note = uracil or N1-methylpseudouracil
  misc_difference 529: note = uracil or N1-methylpseudouracil
  misc_difference 530: note = uracil or N1-methylpseudouracil
  misc_difference 533: note = uracil or N1-methylpseudouracil
  misc_difference 543: note = uracil or N1-methylpseudouracil
  misc_difference 545: note = uracil or N1-methylpseudouracil
  misc_difference 547: note = uracil or N1-methylpseudouracil
  misc_difference 552: note = uracil or N1-methylpseudouracil
  misc_difference 553: note = uracil or N1-methylpseudouracil
  misc_difference 554: note = uracil or N1-methylpseudouracil
  misc_difference 557: note = uracil or N1-methylpseudouracil
  misc_difference 570: note = uracil or N1-methylpseudouracil
  misc_difference 578: note = uracil or N1-methylpseudouracil
  misc_difference 588: note = uracil or N1-methylpseudouracil
  misc_difference 589: note = uracil or N1-methylpseudouracil
  misc_difference 599: note = uracil or N1-methylpseudouracil
  misc_difference 603: note = uracil or N1-methylpseudouracil
  misc_difference 604: note = uracil or N1-methylpseudouracil
  misc_difference 607: note = uracil or N1-methylpseudouracil
  misc_difference 608: note = uracil or N1-methylpseudouracil
  misc_difference 610: note = uracil or N1-methylpseudouracil
  misc_difference 614: note = uracil or N1-methylpseudouracil
  misc_difference 618: note = uracil or N1-methylpseudouracil
  misc_difference 622: note = uracil or N1-methylpseudouracil
  misc_difference 623: note = uracil or N1-methylpseudouracil
  misc_difference 628: note = uracil or N1-methylpseudouracil
  misc_difference 629: note = uracil or N1-methylpseudouracil
  misc_difference 638: note = uracil or N1-methylpseudouracil
  misc_difference 641: note = uracil or N1-methylpseudouracil
  misc_difference 645: note = uracil or N1-methylpseudouracil
  misc_difference 647: note = uracil or N1-methylpseudouracil
  misc_difference 667: note = uracil or N1-methylpseudouracil
  misc_difference 668: note = uracil or N1-methylpseudouracil
  misc_difference 677: note = uracil or N1-methylpseudouracil
  misc_difference 680: note = uracil or N1-methylpseudouracil
  misc_difference 681: note = uracil or N1-methylpseudouracil
  misc_difference 695: note = uracil or N1-methylpseudouracil
  misc_difference 707: note = uracil or N1-methylpseudouracil
  misc_difference 711: note = uracil or N1-methylpseudouracil
  misc_difference 714: note = uracil or N1-methylpseudouracil
  misc_difference 726: note = uracil or N1-methylpseudouracil
  misc_difference 727: note = uracil or N1-methylpseudouracil
  misc_difference 728: note = uracil or N1-methylpseudouracil
  misc_difference 737: note = uracil or N1-methylpseudouracil
  misc_difference 740: note = uracil or N1-methylpseudouracil
  misc_difference 752: note = uracil or N1-methylpseudouracil
  misc_difference 754: note = uracil or N1-methylpseudouracil
  misc_difference 756: note = uracil or N1-methylpseudouracil
  misc_difference 767: note = uracil or N1-methylpseudouracil
  misc_difference 772: note = uracil or N1-methylpseudouracil
  misc_difference 788: note = uracil or N1-methylpseudouracil
  misc_difference 792: note = uracil or N1-methylpseudouracil
  misc_difference 794: note = uracil or N1-methylpseudouracil
  misc_difference 795: note = uracil or N1-methylpseudouracil
  misc_difference 796: note = uracil or N1-methylpseudouracil
  misc_difference 797: note = uracil or N1-methylpseudouracil
  misc_difference 800: note = uracil or N1-methylpseudouracil
  misc_difference 802: note = uracil or N1-methylpseudouracil
  misc_difference 803: note = uracil or N1-methylpseudouracil
  misc_difference 806: note = uracil or N1-methylpseudouracil
  misc_difference 810: note = uracil or N1-methylpseudouracil
  misc_difference 826: note = uracil or N1-methylpseudouracil
  misc_difference 827: note = uracil or N1-methylpseudouracil
  misc_difference 833: note = uracil or N1-methylpseudouracil
  misc_difference 838: note = uracil or N1-methylpseudouracil
  misc_difference 840: note = uracil or N1-methylpseudouracil
  misc_difference 844: note = uracil or N1-methylpseudouracil
  misc_difference 845: note = uracil or N1-methylpseudouracil
  misc_difference 854: note = uracil or N1-methylpseudouracil
  misc_difference 857: note = uracil or N1-methylpseudouracil
  misc_difference 860: note = uracil or N1-methylpseudouracil
  misc_difference 864: note = uracil or N1-methylpseudouracil
  misc_difference 875: note = uracil or N1-methylpseudouracil
  misc_difference 877: note = uracil or N1-methylpseudouracil
  misc_difference 884: note = uracil or N1-methylpseudouracil
  misc_difference 901: note = uracil or N1-methylpseudouracil
  misc_difference 908: note = uracil or N1-methylpseudouracil
  misc_difference 917: note = uracil or N1-methylpseudouracil
  misc_difference 920: note = uracil or N1-methylpseudouracil
  misc_difference 925: note = uracil or N1-methylpseudouracil
  misc_difference 930: note = uracil or N1-methylpseudouracil
  misc_difference 935: note = uracil or N1-methylpseudouracil
  misc_difference 939: note = uracil or N1-methylpseudouracil
  misc_difference 944: note = uracil or N1-methylpseudouracil
  misc_difference 947: note = uracil or N1-methylpseudouracil
  misc_difference 956: note = uracil or N1-methylpseudouracil
  misc_difference 959: note = uracil or N1-methylpseudouracil
  misc_difference 971: note = uracil or N1-methylpseudouracil
  misc_difference 974: note = uracil or N1-methylpseudouracil
  misc_difference 977: note = uracil or N1-methylpseudouracil
  misc_difference 980: note = uracil or N1-methylpseudouracil
  misc_difference 982: note = uracil or N1-methylpseudouracil
  misc_difference 983: note = uracil or N1-methylpseudouracil
  misc_difference 989: note = uracil or N1-methylpseudouracil
  misc_difference 1004: note = uracil or N1-methylpseudouracil
  misc_difference 1010: note = uracil or N1-methylpseudouracil
  misc_difference 1012: note = uracil or N1-methylpseudouracil
  misc_difference 1021: note = uracil or N1-methylpseudouracil
  misc_difference 1031: note = uracil or N1-methylpseudouracil
  misc_difference 1034: note = uracil or N1-methylpseudouracil
  misc_difference 1038: note = uracil or N1-methylpseudouracil
  misc_difference 1049: note = uracil or N1-methylpseudouracil
  misc_difference 1055: note = uracil or N1-methylpseudouracil
  misc_difference 1058: note = uracil or N1-methylpseudouracil
  misc_difference 1077: note = uracil or N1-methylpseudouracil
  misc_difference 1079: note = uracil or N1-methylpseudouracil
  misc_difference 1081: note = uracil or N1-methylpseudouracil
  misc_difference 1082: note = uracil or N1-methylpseudouracil
  misc_difference 1087: note = uracil or N1-methylpseudouracil
  misc_difference 1088: note = uracil or N1-methylpseudouracil
  misc_difference 1091: note = uracil or N1-methylpseudouracil
  misc_difference 1092: note = uracil or N1-methylpseudouracil
  misc_difference 1094: note = uracil or N1-methylpseudouracil
  misc_difference 1095: note = uracil or N1-methylpseudouracil
  misc_difference 1096: note = uracil or N1-methylpseudouracil
  misc_difference 1102: note = uracil or N1-methylpseudouracil
  misc_difference 1112: note = uracil or N1-methylpseudouracil
  misc_difference 1124: note = uracil or N1-methylpseudouracil
  misc_difference 1130: note = uracil or N1-methylpseudouracil
  misc_difference 1136: note = uracil or N1-methylpseudouracil
  misc_difference 1139: note = uracil or N1-methylpseudouracil
  misc_difference 1157: note = uracil or N1-methylpseudouracil
  misc_difference 1163: note = uracil or N1-methylpseudouracil
  misc_difference 1168: note = uracil or N1-methylpseudouracil
  misc_difference 1169: note = uracil or N1-methylpseudouracil
  misc_difference 1178: note = uracil or N1-methylpseudouracil
  misc_difference 1180: note = uracil or N1-methylpseudouracil
  misc_difference 1196: note = uracil or N1-methylpseudouracil
  misc_difference 1198: note = uracil or N1-methylpseudouracil
  misc_difference 1199: note = uracil or N1-methylpseudouracil
  misc_difference 1206: note = uracil or N1-methylpseudouracil
  misc_difference 1216: note = uracil or N1-methylpseudouracil
  misc_difference 1226: note = uracil or N1-methylpseudouracil
  misc_difference 1232: note = uracil or N1-methylpseudouracil
  misc_difference 1239: note = uracil or N1-methylpseudouracil
  misc_difference 1249: note = uracil or N1-methylpseudouracil
  misc_difference 1250: note = uracil or N1-methylpseudouracil
  misc_difference 1256: note = uracil or N1-methylpseudouracil
  misc_difference 1262: note = uracil or N1-methylpseudouracil
  misc_difference 1268: note = uracil or N1-methylpseudouracil
  misc_difference 1272: note = uracil or N1-methylpseudouracil
  misc_difference 1276: note = uracil or N1-methylpseudouracil
  misc_difference 1298: note = uracil or N1-methylpseudouracil
  misc_difference 1301: note = uracil or N1-methylpseudouracil
  misc_difference 1304: note = uracil or N1-methylpseudouracil
  misc_difference 1311: note = uracil or N1-methylpseudouracil
  misc_difference 1313: note = uracil or N1-methylpseudouracil
  misc_difference 1319: note = uracil or N1-methylpseudouracil
  misc_difference 1320: note = uracil or N1-methylpseudouracil
  misc_difference 1323: note = uracil or N1-methylpseudouracil
  misc_difference 1331: note = uracil or N1-methylpseudouracil
  misc_difference 1337: note = uracil or N1-methylpseudouracil
  misc_difference 1340: note = uracil or N1-methylpseudouracil
  misc_difference 1343: note = uracil or N1-methylpseudouracil
  misc_difference 1345: note = uracil or N1-methylpseudouracil
  misc_difference 1354: note = uracil or N1-methylpseudouracil
  misc_difference 1360: note = uracil or N1-methylpseudouracil
  misc_difference 1366: note = uracil or N1-methylpseudouracil
  misc_difference 1368: note = uracil or N1-methylpseudouracil
  misc_difference 1379: note = uracil or N1-methylpseudouracil
  misc_difference 1385: note = uracil or N1-methylpseudouracil
  misc_difference 1386: note = uracil or N1-methylpseudouracil
  misc_difference 1390: note = uracil or N1-methylpseudouracil
  misc_difference 1392: note = uracil or N1-methylpseudouracil
  misc_difference 1393: note = uracil or N1-methylpseudouracil
  misc_difference 1395: note = uracil or N1-methylpseudouracil
  misc_difference 1399: note = uracil or N1-methylpseudouracil
  misc_difference 1419: note = uracil or N1-methylpseudouracil
  misc_difference 1420: note = uracil or N1-methylpseudouracil
  misc_difference 1421: note = uracil or N1-methylpseudouracil
  misc_difference 1426: note = uracil or N1-methylpseudouracil
  misc_difference 1433: note = uracil or N1-methylpseudouracil
  misc_difference 1435: note = uracil or N1-methylpseudouracil
  misc_difference 1437: note = uracil or N1-methylpseudouracil
  misc_difference 1441: note = uracil or N1-methylpseudouracil
  misc_difference 1449: note = uracil or N1-methylpseudouracil
  misc_difference 1457: note = uracil or N1-methylpseudouracil
  misc_difference 1464: note = uracil or N1-methylpseudouracil
  misc_difference 1468: note = uracil or N1-methylpseudouracil
  misc_difference 1474: note = uracil or N1-methylpseudouracil
  misc_difference 1487: note = uracil or N1-methylpseudouracil
  misc_difference 1490: note = uracil or N1-methylpseudouracil
  misc_difference 1492: note = uracil or N1-methylpseudouracil
  misc_difference 1494: note = uracil or N1-methylpseudouracil
  misc_difference 1497: note = uracil or N1-methylpseudouracil
  misc_difference 1504: note = uracil or N1-methylpseudouracil
  misc_difference 1506: note = uracil or N1-methylpseudouracil
  misc_difference 1518: note = uracil or N1-methylpseudouracil
  misc_difference 1524: note = uracil or N1-methylpseudouracil
  misc_difference 1530: note = uracil or N1-methylpseudouracil
  misc_difference 1531: note = uracil or N1-methylpseudouracil
  misc_difference 1533: note = uracil or N1-methylpseudouracil
  misc_difference 1549: note = uracil or N1-methylpseudouracil
  misc_difference 1552: note = uracil or N1-methylpseudouracil
  misc_difference 1555: note = uracil or N1-methylpseudouracil
  misc_difference 1564: note = uracil or N1-methylpseudouracil
  misc_difference 1568: note = uracil or N1-methylpseudouracil
  misc_difference 1570: note = uracil or N1-methylpseudouracil
  misc_difference 1575: note = uracil or N1-methylpseudouracil
  misc_difference 1577: note = uracil or N1-methylpseudouracil
  misc_difference 1579: note = uracil or N1-methylpseudouracil
  misc_difference 1581: note = uracil or N1-methylpseudouracil
  misc_difference 1585: note = uracil or N1-methylpseudouracil
  misc_difference 1593: note = uracil or N1-methylpseudouracil
  misc_difference 1595: note = uracil or N1-methylpseudouracil
  misc_difference 1597: note = uracil or N1-methylpseudouracil
  misc_difference 1605: note = uracil or N1-methylpseudouracil
  misc_difference 1606: note = uracil or N1-methylpseudouracil
  misc_difference 1609: note = uracil or N1-methylpseudouracil
  misc_difference 1615: note = uracil or N1-methylpseudouracil
  misc_difference 1623: note = uracil or N1-methylpseudouracil
  misc_difference 1624: note = uracil or N1-methylpseudouracil
  misc_difference 1625: note = uracil or N1-methylpseudouracil
  misc_difference 1630: note = uracil or N1-methylpseudouracil
  misc_difference 1634: note = uracil or N1-methylpseudouracil
  misc_difference 1635: note = uracil or N1-methylpseudouracil
  misc_difference 1647: note = uracil or N1-methylpseudouracil
  misc_difference 1649: note = uracil or N1-methylpseudouracil
  misc_difference 1650: note = uracil or N1-methylpseudouracil
  misc_difference 1652: note = uracil or N1-methylpseudouracil
  misc_difference 1654: note = uracil or N1-methylpseudouracil
  misc_difference 1656: note = uracil or N1-methylpseudouracil
  misc_difference 1671: note = uracil or N1-methylpseudouracil
  misc_difference 1672: note = uracil or N1-methylpseudouracil
  misc_difference 1674: note = uracil or N1-methylpseudouracil
  misc_difference 1677: note = uracil or N1-methylpseudouracil
  misc_difference 1678: note = uracil or N1-methylpseudouracil
  misc_difference 1683: note = uracil or N1-methylpseudouracil
  misc_difference 1687: note = uracil or N1-methylpseudouracil
  misc_difference 1691: note = uracil or N1-methylpseudouracil
  misc_difference 1693: note = uracil or N1-methylpseudouracil
  misc_difference 1705: note = uracil or N1-methylpseudouracil
  misc_difference 1717: note = uracil or N1-methylpseudouracil
  misc_difference 1720: note = uracil or N1-methylpseudouracil
  misc_difference 1725: note = uracil or N1-methylpseudouracil
  misc_difference 1726: note = uracil or N1-methylpseudouracil
  misc_difference 1735: note = uracil or N1-methylpseudouracil
  misc_difference 1740: note = uracil or N1-methylpseudouracil
  misc_difference 1747: note = uracil or N1-methylpseudouracil
  misc_difference 1751: note = uracil or N1-methylpseudouracil
  misc_difference 1766: note = uracil or N1-methylpseudouracil
  misc_difference 1769: note = uracil or N1-methylpseudouracil
  misc_difference 1771: note = uracil or N1-methylpseudouracil
  misc_difference 1789: note = uracil or N1-methylpseudouracil
  misc_difference 1791: note = uracil or N1-methylpseudouracil
  misc_difference 1793: note = uracil or N1-methylpseudouracil
  misc_difference 1794: note = uracil or N1-methylpseudouracil
  misc_difference 1795: note = uracil or N1-methylpseudouracil
  misc_difference 1804: note = uracil or N1-methylpseudouracil
  misc_difference 1806: note = uracil or N1-methylpseudouracil
  misc_difference 1808: note = uracil or N1-methylpseudouracil
  misc_difference 1810: note = uracil or N1-methylpseudouracil
  misc_difference 1818: note = uracil or N1-methylpseudouracil
  misc_difference 1821: note = uracil or N1-methylpseudouracil
  misc_difference 1824: note = uracil or N1-methylpseudouracil
  misc_difference 1827: note = uracil or N1-methylpseudouracil
  misc_difference 1836: note = uracil or N1-methylpseudouracil
  misc_difference 1839: note = uracil or N1-methylpseudouracil
  misc_difference 1840: note = uracil or N1-methylpseudouracil
  misc_difference 1849: note = uracil or N1-methylpseudouracil
  misc_difference 1858: note = uracil or N1-methylpseudouracil
  misc_difference 1860: note = uracil or N1-methylpseudouracil
  misc_difference 1870: note = uracil or N1-methylpseudouracil
  misc_difference 1876: note = uracil or N1-methylpseudouracil
  misc_difference 1888: note = uracil or N1-methylpseudouracil
  misc_difference 1892: note = uracil or N1-methylpseudouracil
  misc_difference 1897: note = uracil or N1-methylpseudouracil
  misc_difference 1899: note = uracil or N1-methylpseudouracil
  misc_difference 1904: note = uracil or N1-methylpseudouracil
  misc_difference 1906: note = uracil or N1-methylpseudouracil
  misc_difference 1911: note = uracil or N1-methylpseudouracil
  misc_difference 1933: note = uracil or N1-methylpseudouracil
  misc_difference 1935: note = uracil or N1-methylpseudouracil
  misc_difference 1937: note = uracil or N1-methylpseudouracil
  misc_difference 1938: note = uracil or N1-methylpseudouracil
  misc_difference 1945: note = uracil or N1-methylpseudouracil
  misc_difference 1951: note = uracil or N1-methylpseudouracil
  misc_difference 1952: note = uracil or N1-methylpseudouracil
  misc_difference 1956: note = uracil or N1-methylpseudouracil
  misc_difference 1967: note = uracil or N1-methylpseudouracil
  misc_difference 1984: note = uracil or N1-methylpseudouracil
  misc_difference 1985: note = uracil or N1-methylpseudouracil
  misc_difference 2003: note = uracil or N1-methylpseudouracil
  misc_difference 2008: note = uracil or N1-methylpseudouracil
  misc_difference 2010: note = uracil or N1-methylpseudouracil
  misc_difference 2013: note = uracil or N1-methylpseudouracil
  misc_difference 2015: note = uracil or N1-methylpseudouracil
  misc_difference 2032: note = uracil or N1-methylpseudouracil
  misc_difference 2036: note = uracil or N1-methylpseudouracil
  misc_difference 2039: note = uracil or N1-methylpseudouracil
  misc_difference 2044: note = uracil or N1-methylpseudouracil
  misc_difference 2045: note = uracil or N1-methylpseudouracil
  misc_difference 2048: note = uracil or N1-methylpseudouracil
  misc_difference 2051: note = uracil or N1-methylpseudouracil
  misc_difference 2052: note = uracil or N1-methylpseudouracil
  misc_difference 2055: note = uracil or N1-methylpseudouracil
  misc_difference 2078: note = uracil or N1-methylpseudouracil
  misc_difference 2081: note = uracil or N1-methylpseudouracil
  misc_difference 2086: note = uracil or N1-methylpseudouracil
  misc_difference 2090: note = uracil or N1-methylpseudouracil
  misc_difference 2104: note = uracil or N1-methylpseudouracil
  misc_difference 2106: note = uracil or N1-methylpseudouracil
  misc_difference 2109: note = uracil or N1-methylpseudouracil
  misc_difference 2115: note = uracil or N1-methylpseudouracil
  misc_difference 2118: note = uracil or N1-methylpseudouracil
  misc_difference 2121: note = uracil or N1-methylpseudouracil
  misc_difference 2123: note = uracil or N1-methylpseudouracil
  misc_difference 2127: note = uracil or N1-methylpseudouracil
  misc_difference 2129: note = uracil or N1-methylpseudouracil
  misc_difference 2132: note = uracil or N1-methylpseudouracil
  misc_difference 2135: note = uracil or N1-methylpseudouracil
  misc_difference 2138: note = uracil or N1-methylpseudouracil
  misc_difference 2139: note = uracil or N1-methylpseudouracil
  misc_difference 2144: note = uracil or N1-methylpseudouracil
  misc_difference 2150: note = uracil or N1-methylpseudouracil
  misc_difference 2156: note = uracil or N1-methylpseudouracil
  misc_difference 2157: note = uracil or N1-methylpseudouracil
  misc_difference 2159: note = uracil or N1-methylpseudouracil
  misc_difference 2160: note = uracil or N1-methylpseudouracil
  misc_difference 2162: note = uracil or N1-methylpseudouracil
  misc_difference 2165: note = uracil or N1-methylpseudouracil
  misc_difference 2166: note = uracil or N1-methylpseudouracil
  misc_difference 2171: note = uracil or N1-methylpseudouracil
  misc_difference 2174: note = uracil or N1-methylpseudouracil
  misc_difference 2177: note = uracil or N1-methylpseudouracil
  misc_difference 2180: note = uracil or N1-methylpseudouracil
  misc_difference 2182: note = uracil or N1-methylpseudouracil
  misc_difference 2184: note = uracil or N1-methylpseudouracil
  misc_difference 2186: note = uracil or N1-methylpseudouracil
  misc_difference 2187: note = uracil or N1-methylpseudouracil
  misc_difference 2188: note = uracil or N1-methylpseudouracil
  misc_difference 2195: note = uracil or N1-methylpseudouracil
  misc_difference 2198: note = uracil or N1-methylpseudouracil
  misc_difference 2201: note = uracil or N1-methylpseudouracil
  misc_difference 2206: note = uracil or N1-methylpseudouracil
  misc_difference 2207: note = uracil or N1-methylpseudouracil
  misc_difference 2225: note = uracil or N1-methylpseudouracil
  misc_difference 2226: note = uracil or N1-methylpseudouracil
  misc_difference 2233: note = uracil or N1-methylpseudouracil
  misc_difference 2234: note = uracil or N1-methylpseudouracil
  misc_difference 2260: note = uracil or N1-methylpseudouracil
  misc_difference 2274: note = uracil or N1-methylpseudouracil
  misc_difference 2280: note = uracil or N1-methylpseudouracil
  misc_difference 2282: note = uracil or N1-methylpseudouracil
  misc_difference 2284: note = uracil or N1-methylpseudouracil
  misc_difference 2295: note = uracil or N1-methylpseudouracil
  misc_difference 2301: note = uracil or N1-methylpseudouracil
  misc_difference 2305: note = uracil or N1-methylpseudouracil
  misc_difference 2306: note = uracil or N1-methylpseudouracil
  misc_difference 2315: note = uracil or N1-methylpseudouracil
  misc_difference 2320: note = uracil or N1-methylpseudouracil
  misc_difference 2345: note = uracil or N1-methylpseudouracil
  misc_difference 2349: note = uracil or N1-methylpseudouracil
  misc_difference 2351: note = uracil or N1-methylpseudouracil
  misc_difference 2352: note = uracil or N1-methylpseudouracil
  misc_difference 2353: note = uracil or N1-methylpseudouracil
  misc_difference 2355: note = uracil or N1-methylpseudouracil
  misc_difference 2362: note = uracil or N1-methylpseudouracil
  misc_difference 2367: note = uracil or N1-methylpseudouracil
  misc_difference 2373: note = uracil or N1-methylpseudouracil
  misc_difference 2375: note = uracil or N1-methylpseudouracil
  misc_difference 2379: note = uracil or N1-methylpseudouracil
  misc_difference 2382: note = uracil or N1-methylpseudouracil
  misc_difference 2387: note = uracil or N1-methylpseudouracil
  misc_difference 2389: note = uracil or N1-methylpseudouracil
  misc_difference 2390: note = uracil or N1-methylpseudouracil
  misc_difference 2394: note = uracil or N1-methylpseudouracil
  misc_difference 2395: note = uracil or N1-methylpseudouracil
  misc_difference 2396: note = uracil or N1-methylpseudouracil
  misc_difference 2400: note = uracil or N1-methylpseudouracil
  misc_difference 2401: note = uracil or N1-methylpseudouracil

SEQ ID NO: 5 - RNA, 2406 nt, unidentified
  source 1..2406: mol_type = unassigned RNA
  misc_difference 2: note = uracil or N1-methylpseudouracil
  misc_difference 8: note = uracil or N1-methylpseudouracil
  misc_difference 14: note = uracil or N1-methylpseudouracil
  misc_difference 17: note = uracil or N1-methylpseudouracil
  misc_difference 19: note = uracil or N1-methylpseudouracil
  misc_difference 23: note = uracil or N1-methylpseudouracil
  misc_difference 25: note = uracil or N1-methylpseudouracil
  misc_difference 26: note = uracil or N1-methylpseudouracil
  misc_difference 28: note = uracil or N1-methylpseudouracil
  misc_difference 29: note = uracil or N1-methylpseudouracil
  misc_difference 32: note = uracil or N1-methylpseudouracil
  misc_difference 34: note = uracil or N1-methylpseudouracil
  misc_difference 35: note = uracil or N1-methylpseudouracil
  misc_difference 38: note = uracil or N1-methylpseudouracil
  misc_difference 56: note = uracil or N1-methylpseudouracil
  misc_difference 63: note = uracil or N1-methylpseudouracil
  misc_difference 67: note = uracil or N1-methylpseudouracil
  misc_difference 74: note = uracil or N1-methylpseudouracil
  misc_difference 75: note = uracil or N1-methylpseudouracil
  misc_difference 78: note = uracil or N1-methylpseudouracil
  misc_difference 91: note = uracil or N1-methylpseudouracil
  misc_difference 100: note = uracil or N1-methylpseudouracil
  misc_difference 104: note = uracil or N1-methylpseudouracil
  misc_difference 107: note = uracil or N1-methylpseudouracil
  misc_difference 110: note = uracil or N1-methylpseudouracil
  misc_difference 121: note = uracil or N1-methylpseudouracil
  misc_difference 127: note = uracil or N1-methylpseudouracil
  misc_difference 130: note = uracil or N1-methylpseudouracil
  misc_difference 135: note = uracil or N1-methylpseudouracil
  misc_difference 145: note = uracil or N1-methylpseudouracil
  misc_difference 146: note = uracil or N1-methylpseudouracil
  misc_difference 164: note = uracil or N1-methylpseudouracil
  misc_difference 175: note = uracil or N1-methylpseudouracil
  misc_difference 194: note = uracil or N1-methylpseudouracil
  misc_difference 197: note = uracil or N1-methylpseudouracil
  misc_difference 208: note = uracil or N1-methylpseudouracil
  misc_difference 215: note = uracil or N1-methylpseudouracil
  misc_difference 220: note = uracil or N1-methylpseudouracil
  misc_difference 221: note = uracil or N1-methylpseudouracil
  misc_difference 224: note = uracil or N1-methylpseudouracil
  misc_difference 236: note = uracil or N1-methylpseudouracil
  misc_difference 238: note = uracil or N1-methylpseudouracil
  misc_difference 240: note = uracil or N1-methylpseudouracil
  misc_difference 245: note = uracil or N1-methylpseudouracil
  misc_difference 251: note = uracil or N1-methylpseudouracil
  misc_difference 254: note = uracil or N1-methylpseudouracil
  misc_difference 269: note = uracil or N1-methylpseudouracil
  misc_difference 275: note = uracil or N1-methylpseudouracil
  misc_difference 276: note = uracil or N1-methylpseudouracil
  misc_difference 295: note = uracil or N1-methylpseudouracil
  misc_difference 297: note = uracil or N1-methylpseudouracil
  misc_difference 302: note = uracil or N1-methylpseudouracil
  misc_difference 305: note = uracil or N1-methylpseudouracil
  misc_difference 311: note = uracil or N1-methylpseudouracil
  misc_difference 326: note = uracil or N1-methylpseudouracil
  misc_difference 329: note = uracil or N1-methylpseudouracil
  misc_difference 332: note = uracil or N1-methylpseudouracil
  misc_difference 338: note = uracil or N1-methylpseudouracil
  misc_difference 345: note = uracil or N1-methylpseudouracil
  misc_difference 351: note = uracil or N1-methylpseudouracil
  misc_difference 362: note = uracil or N1-methylpseudouracil
  misc_difference 368: note = uracil or N1-methylpseudouracil
  misc_difference 374: note = uracil or N1-methylpseudouracil
  misc_difference 391: note = uracil or N1-methylpseudouracil
  misc_difference 396: note = uracil or N1-methylpseudouracil
  misc_difference 398: note = uracil or N1-methylpseudouracil
  misc_difference 404: note = uracil or N1-methylpseudouracil
  misc_difference 406: note = uracil or N1-methylpseudouracil
  misc_difference 409: note = uracil or N1-methylpseudouracil
  misc_difference 413: note = uracil or N1-methylpseudouracil
  misc_difference 416: note = uracil or N1-methylpseudouracil
  misc_difference 422: note = uracil or N1-methylpseudouracil
  misc_difference 424: note = uracil or N1-methylpseudouracil
  misc_difference 434: note = uracil or N1-methylpseudouracil
  misc_difference 444: note = uracil or N1-methylpseudouracil
  misc_difference 446: note = uracil or N1-methylpseudouracil
  misc_difference 455: note = uracil or N1-methylpseudouracil
  misc_difference 464: note = uracil or N1-methylpseudouracil
  misc_difference 476: note = uracil or N1-methylpseudouracil
  misc_difference 488: note = uracil or N1-methylpseudouracil
  misc_difference 490: note = uracil or N1-methylpseudouracil
  misc_difference 497: note = uracil or N1-methylpseudouracil
  misc_difference 502: note = uracil or N1-methylpseudouracil
  misc_difference 508: note = uracil or N1-methylpseudouracil
  misc_difference 509: note = uracil or N1-methylpseudouracil
  misc_difference 515: note = uracil or N1-methylpseudouracil
  misc_difference 520: note = uracil or N1-methylpseudouracil
  misc_difference 521: note = uracil or N1-methylpseudouracil
  misc_difference 526: note = uracil or N1-methylpseudouracil
  misc_difference 529: note = uracil or N1-methylpseudouracil
  misc_difference 530: note = uracil or N1-methylpseudouracil
  misc_difference 533: note = uracil or N1-methylpseudouracil
  misc_difference 545: note = uracil or N1-methylpseudouracil
  misc_difference 553: note = uracil or N1-methylpseudouracil
  misc_difference 554: note = uracil or N1-methylpseudouracil
  misc_difference 557: note = uracil or N1-methylpseudouracil
  misc_difference 570: note = uracil or N1-methylpseudouracil
  misc_difference 578: note = uracil or N1-methylpseudouracil
  misc_difference 589: note = uracil or N1-methylpseudouracil
  misc_difference 599: note = uracil or N1-methylpseudouracil
  misc_difference 603: note = uracil or N1-methylpseudouracil
  misc_difference 604: note = uracil or N1-methylpseudouracil
  misc_difference 607: note = uracil or N1-methylpseudouracil
  misc_difference 608: note = uracil or N1-methylpseudouracil
  misc_difference 610: note = uracil or N1-methylpseudouracil
  misc_difference 614: note = uracil or N1-methylpseudouracil
  misc_difference 622: note = uracil or N1-methylpseudouracil
  misc_difference 623: note = uracil or N1-methylpseudouracil
  misc_difference 628: note = uracil or N1-methylpseudouracil
  misc_difference 629: note = uracil or N1-methylpseudouracil
  misc_difference 638: note = uracil or N1-methylpseudouracil
  misc_difference 641: note = uracil or N1-methylpseudouracil
  misc_difference 647: note = uracil or N1-methylpseudouracil
  misc_difference 667: note = uracil or N1-methylpseudouracil
  misc_difference 668: note = uracil or N1-methylpseudouracil
  misc_difference 677: note = uracil or N1-methylpseudouracil
  misc_difference 680: note = uracil or N1-methylpseudouracil
  misc_difference 695: note = uracil or N1-methylpseudouracil
  misc_difference 707: note = uracil or N1-methylpseudouracil
  misc_difference 723: note = uracil or N1-methylpseudouracil
  misc_difference 727: note = uracil or N1-methylpseudouracil
  misc_difference 728: note = uracil or N1-methylpseudouracil
  misc_difference 735: note = uracil or N1-methylpseudouracil
  misc_difference 737: note = uracil or N1-methylpseudouracil
  misc_difference 740: note = uracil or N1-methylpseudouracil
  misc_difference 752: note = uracil or N1-methylpseudouracil
  misc_difference 754: note = uracil or N1-methylpseudouracil
  misc_difference 767: note = uracil or N1-methylpseudouracil
  misc_difference 772: note = uracil or N1-methylpseudouracil
  misc_difference 788: note = uracil or N1-methylpseudouracil
  misc_difference 794: note = uracil or N1-methylpseudouracil
  misc_difference 797: note = uracil or N1-methylpseudouracil
  misc_difference 800: note = uracil or N1-methylpseudouracil
  misc_difference 802: note = uracil or N1-methylpseudouracil
  misc_difference 803: note = uracil or N1-methylpseudouracil
  misc_difference 806: note = uracil or N1-methylpseudouracil
  misc_difference 808: note = uracil or N1-methylpseudouracil
  misc_difference 820: note = uracil or N1-methylpseudouracil
  misc_difference 826: note = uracil or N1-methylpseudouracil
  misc_difference 827: note = uracil or N1-methylpseudouracil
  misc_difference 833: note = uracil or N1-methylpseudouracil
  misc_difference 845: note = uracil or N1-methylpseudouracil
  misc_difference 852: note = uracil or N1-methylpseudouracil
  misc_difference 854: note = uracil or N1-methylpseudouracil
  misc_difference 857: note = uracil or N1-methylpseudouracil
  misc_difference 860: note = uracil or N1-methylpseudouracil
  misc_difference 864: note = uracil or N1-methylpseudouracil
  misc_difference 875: note = uracil or N1-methylpseudouracil
  misc_difference 877: note = uracil or N1-methylpseudouracil
  misc_difference 884: note = uracil or N1-methylpseudouracil
  misc_difference 901: note = uracil or N1-methylpseudouracil
  misc_difference 908: note = uracil or N1-methylpseudouracil
  misc_difference 917: note = uracil or N1-methylpseudouracil
  misc_difference 920: note = uracil or N1-methylpseudouracil
  misc_difference 925: note = uracil or N1-methylpseudouracil
  misc_difference 935: note = uracil or N1-methylpseudouracil
  misc_difference 944: note = uracil or N1-methylpseudouracil
  misc_difference 947: note = uracil or N1-methylpseudouracil
  misc_difference 956: note = uracil or N1-methylpseudouracil
  misc_difference 959: note = uracil or N1-methylpseudouracil
  misc_difference 971: note = uracil or N1-methylpseudouracil
  misc_difference 974: note = uracil or N1-methylpseudouracil
  misc_difference 977: note = uracil or N1-methylpseudouracil
  misc_difference 980: note = uracil or N1-methylpseudouracil
  misc_difference 982: note = uracil or N1-methylpseudouracil
  misc_difference 983: note = uracil or N1-methylpseudouracil
  misc_difference 989: note = uracil or N1-methylpseudouracil
  misc_difference 1004: note = uracil or N1-methylpseudouracil
  misc_difference 1010: note = uracil or N1-methylpseudouracil
  misc_difference 1012: note = uracil or N1-methylpseudouracil
  misc_difference 1021: note = uracil or N1-methylpseudouracil
  misc_difference 1031: note = uracil or N1-methylpseudouracil
  misc_difference 1034: note = uracil or N1-methylpseudouracil
  misc_difference 1035: note = uracil or N1-methylpseudouracil
  misc_difference 1049: note = uracil or N1-methylpseudouracil
  misc_difference 1053: note = uracil or N1-methylpseudouracil
  misc_difference 1055: note = uracil or N1-methylpseudouracil
  misc_difference 1058: note = uracil or N1-methylpseudouracil
  misc_difference 1079: note = uracil or N1-methylpseudouracil
  misc_difference 1082: note = uracil or N1-methylpseudouracil
  misc_difference 1088: note = uracil or N1-methylpseudouracil
  misc_difference 1091: note = uracil or N1-methylpseudouracil
  misc_difference 1094: note = uracil or N1-methylpseudouracil
  misc_difference 1096: note = uracil or N1-methylpseudouracil
  misc_difference 1102: note = uracil or N1-methylpseudouracil
  misc_difference 1112: note = uracil or N1-methylpseudouracil
  misc_difference 1124: note = uracil or N1-methylpseudouracil
  misc_difference 1130: note = uracil or N1-methylpseudouracil
  misc_difference 1136: note = uracil or N1-methylpseudouracil
  misc_difference 1139: note = uracil or N1-methylpseudouracil
  misc_difference 1157: note = uracil or N1-methylpseudouracil
  misc_difference 1163: note = uracil or N1-methylpseudouracil
  misc_difference 1165: note = uracil or N1-methylpseudouracil
  misc_difference 1168: note = uracil or N1-methylpseudouracil
  misc_difference 1169: note = uracil or N1-methylpseudouracil
  misc_difference 1178: note = uracil or N1-methylpseudouracil
  misc_difference 1180: note = uracil or N1-methylpseudouracil
  misc_difference 1196: note = uracil or N1-methylpseudouracil
  misc_difference 1198: note = uracil or N1-methylpseudouracil
  misc_difference 1199: note = uracil or N1-methylpseudouracil
  misc_difference 1216: note = uracil or N1-methylpseudouracil
  misc_difference 1226: note = uracil or N1-methylpseudouracil
  misc_difference 1232: note = uracil or N1-methylpseudouracil
  misc_difference 1249: note = uracil or N1-methylpseudouracil
  misc_difference 1250: note = uracil or N1-methylpseudouracil
  misc_difference 1256: note = uracil or N1-methylpseudouracil
  misc_difference 1262: note = uracil or N1-methylpseudouracil
  misc_difference 1268: note = uracil or N1-methylpseudouracil
  misc_difference 1272: note = uracil or N1-methylpseudouracil
  misc_difference 1276: note = uracil or N1-methylpseudouracil
  misc_difference 1278: note = uracil or N1-methylpseudouracil
  misc_difference 1298: note = uracil or N1-methylpseudouracil
  misc_difference 1301: note = uracil or N1-methylpseudouracil
  misc_difference 1304: note = uracil or N1-methylpseudouracil
  misc_difference 1313: note = uracil or N1-methylpseudouracil
  misc_difference 1319: note = uracil or N1-methylpseudouracil
  misc_difference 1331: note = uracil or N1-methylpseudouracil
  misc_difference 1337: note = uracil or N1-methylpseudouracil
  misc_difference 1340: note = uracil or N1-methylpseudouracil
  misc_difference 1343: note = uracil or N1-methylpseudouracil
  misc_difference 1345: note = uracil or N1-methylpseudouracil
  misc_difference 1347: note = uracil or N1-methylpseudouracil
  misc_difference 1354: note = uracil or N1-methylpseudouracil
  misc_difference 1360: note = uracil or N1-methylpseudouracil
  misc_difference 1366: note = uracil or N1-methylpseudouracil
  misc_difference 1379: note = uracil or N1-methylpseudouracil
  misc_difference 1385: note = uracil or N1-methylpseudouracil
  misc_difference 1390: note = uracil or N1-methylpseudouracil
  misc_difference 1392: note = uracil or N1-methylpseudouracil
  misc_difference 1399: note = uracil or N1-methylpseudouracil
  misc_difference 1419: note = uracil or N1-methylpseudouracil
  misc_difference 1420: note = uracil or N1-methylpseudouracil
  misc_difference 1421: note = uracil or N1-methylpseudouracil
  misc_difference 1426: note = uracil or N1-methylpseudouracil
  misc_difference 1428: note = uracil or N1-methylpseudouracil
  misc_difference 1433: note = uracil or N1-methylpseudouracil
  misc_difference 1435: note = uracil or N1-methylpseudouracil
  misc_difference 1437: note = uracil or N1-methylpseudouracil
  misc_difference 1441: note = uracil or N1-methylpseudouracil
  misc_difference 1452: note = uracil or N1-methylpseudouracil
  misc_difference 1457: note = uracil or N1-methylpseudouracil
  misc_difference 1468: note = uracil or N1-methylpseudouracil
  misc_difference 1470: note = uracil or N1-methylpseudouracil
  misc_difference 1474: note = uracil or N1-methylpseudouracil
  misc_difference 1487: note = uracil or N1-methylpseudouracil
  misc_difference 1490: note = uracil or N1-methylpseudouracil
  misc_difference 1504: note = uracil or N1-methylpseudouracil
  misc_difference 1531: note = uracil or N1-methylpseudouracil
  misc_difference 1533: note = uracil or N1-methylpseudouracil
  misc_difference 1534: note = uracil or N1-methylpseudouracil
  misc_difference 1539: note = uracil or N1-methylpseudouracil
  misc_difference 1549: note = uracil or N1-methylpseudouracil
  misc_difference 1552: note = uracil or N1-methylpseudouracil
  misc_difference 1555: note = uracil or N1-methylpseudouracil
  misc_difference 1564: note = uracil or N1-methylpseudouracil
  misc_difference 1568: note = uracil or N1-methylpseudouracil
  misc_difference 1570: note = uracil or N1-methylpseudouracil
  misc_difference 1572: note = uracil or N1-methylpseudouracil
  misc_difference 1577: note = uracil or N1-methylpseudouracil
  misc_difference 1585: note = uracil or N1-methylpseudouracil
  misc_difference 1595: note = uracil or N1-methylpseudouracil
  misc_difference 1597: note = uracil or N1-methylpseudouracil
  misc_difference 1606: note = uracil or N1-methylpseudouracil
  misc_difference 1609: note = uracil or N1-methylpseudouracil
  misc_difference 1615: note = uracil or N1-methylpseudouracil
  misc_difference 1624: note = uracil or N1-methylpseudouracil
  misc_difference 1625: note = uracil or N1-methylpseudouracil
  misc_difference 1627: note = uracil or N1-methylpseudouracil
  misc_difference 1630: note = uracil or N1-methylpseudouracil
  misc_difference 1634: note = uracil or N1-methylpseudouracil
  misc_difference 1649: note = uracil or N1-methylpseudouracil
  misc_difference 1652: note = uracil or N1-methylpseudouracil
  misc_difference 1654: note = uracil or N1-methylpseudouracil
  misc_difference 1656: note = uracil or N1-methylpseudouracil
  misc_difference 1672: note = uracil or N1-methylpseudouracil
  misc_difference 1678: note = uracil or N1-methylpseudouracil
  misc_difference 1687: note = uracil or N1-methylpseudouracil
  misc_difference 1691: note = uracil or N1-methylpseudouracil
  misc_difference 1693: note = uracil or N1-methylpseudouracil
  misc_difference 1701: note = uracil or N1-methylpseudouracil
  misc_difference 1705: note = uracil or N1-methylpseudouracil
  misc_difference 1717: note = uracil or N1-methylpseudouracil
  misc_difference 1720: note = uracil or N1-methylpseudouracil
  misc_difference 1726: note = uracil or N1-methylpseudouracil
  misc_difference 1735: note = uracil or N1-methylpseudouracil
  misc_difference 1744: note = uracil or N1-methylpseudouracil
  misc_difference 1746: note = uracil or N1-methylpseudouracil
  misc_difference 1747: note = uracil or N1-methylpseudouracil
  misc_difference 1751: note = uracil or N1-methylpseudouracil
  misc_difference 1753: note = uracil or N1-methylpseudouracil
  misc_difference 1766: note = uracil or N1-methylpseudouracil
  misc_difference 1769: note = uracil or N1-methylpseudouracil
  misc_difference 1771: note = uracil or N1-methylpseudouracil
  misc_difference 1773: note = uracil or N1-methylpseudouracil
  misc_difference 1774: note = uracil or N1-methylpseudouracil
  misc_difference 1788: note = uracil or N1-methylpseudouracil
  misc_difference 1789: note = uracil or N1-methylpseudouracil
  misc_difference 1793: note = uracil or N1-methylpseudouracil
  misc_difference 1795: note = uracil or N1-methylpseudouracil
  misc_difference 1804: note = uracil or N1-methylpseudouracil
  misc_difference 1808: note = uracil or N1-methylpseudouracil
  misc_difference 1810: note = uracil or N1-methylpseudouracil
  misc_difference 1821: note = uracil or N1-methylpseudouracil
  misc_difference 1828: note = uracil or N1-methylpseudouracil
  misc_difference 1833: note = uracil or N1-methylpseudouracil
  misc_difference 1836: note = uracil or N1-methylpseudouracil
  misc_difference 1840: note = uracil or N1-methylpseudouracil
  misc_difference 1849: note = uracil or N1-methylpseudouracil
  misc_difference 1858: note = uracil or N1-methylpseudouracil
  misc_difference 1860: note = uracil or N1-methylpseudouracil
  misc_difference 1870: note = uracil or N1-methylpseudouracil
  misc_difference 1885: note = uracil or N1-methylpseudouracil
  misc_difference 1887: note = uracil or N1-methylpseudouracil
  misc_difference 1888: note = uracil or N1-methylpseudouracil
  misc_difference 1892: note = uracil or N1-methylpseudouracil
  misc_difference 1897: note = uracil or N1-methylpseudouracil
  misc_difference 1904: note = uracil or N1-methylpseudouracil
  misc_difference 1906: note = uracil or N1-methylpseudouracil
  misc_difference 1923: note = uracil or N1-methylpseudouracil
  misc_difference 1933: note = uracil or N1-methylpseudouracil
  misc_difference 1937: note = uracil or N1-methylpseudouracil
  misc_difference 1945: note = uracil or N1-methylpseudouracil
  misc_difference 1952: note = uracil or N1-methylpseudouracil
  misc_difference 1967: note = uracil or N1-methylpseudouracil
  misc_difference 1971: note = uracil or N1-methylpseudouracil
  misc_difference 1984: note = uracil or N1-methylpseudouracil
  misc_difference 1985: note = uracil or N1-methylpseudouracil
  misc_difference 1987: note = uracil or N1-methylpseudouracil
  misc_difference 2003: note = uracil or N1-methylpseudouracil
  misc_difference 2005: note = uracil or N1-methylpseudouracil
  misc_difference 2008: note = uracil or N1-methylpseudouracil
  misc_difference 2011: note = uracil or N1-methylpseudouracil
  misc_difference 2015: note = uracil or N1-methylpseudouracil
  misc_difference 2032: note = uracil or N1-methylpseudouracil
  misc_difference 2036: note = uracil or N1-methylpseudouracil
  misc_difference 2039: note = uracil or N1-methylpseudouracil
  misc_difference 2044: note = uracil or N1-methylpseudouracil
  misc_difference 2045: note = uracil or N1-methylpseudouracil
  misc_difference 2048: note = uracil or N1-methylpseudouracil
  misc_difference 2051: note = uracil or N1-methylpseudouracil
  misc_difference 2078: note = uracil or N1-methylpseudouracil
  misc_difference 2081: note = uracil or N1-methylpseudouracil
  misc_difference 2086: note = uracil or N1-methylpseudouracil
  misc_difference 2090: note = uracil or N1-methylpseudouracil
  misc_difference 2104: note = uracil or N1-methylpseudouracil
  misc_difference 2118: note = uracil or N1-methylpseudouracil
  misc_difference 2123: note = uracil or N1-methylpseudouracil
  misc_difference 2129: note = uracil or N1-methylpseudouracil
  misc_difference 2132: note = uracil or N1-methylpseudouracil
  misc_difference 2135: note = uracil or N1-methylpseudouracil
  misc_difference 2138: note = uracil or N1-methylpseudouracil
  misc_difference 2144: note = uracil or N1-methylpseudouracil
  misc_difference 2150: note = uracil or N1-methylpseudouracil
  misc_difference 2156: note = uracil or N1-methylpseudouracil
  misc_difference 2159: note = uracil or N1-methylpseudouracil
  misc_difference 2162: note = uracil or N1-methylpseudouracil
  misc_difference 2165: note = uracil or N1-methylpseudouracil
  misc_difference 2171: note = uracil or N1-methylpseudouracil
  misc_difference 2174: note = uracil or N1-methylpseudouracil
  misc_difference 2177: note = uracil or N1-methylpseudouracil
  misc_difference 2180: note = uracil or N1-methylpseudouracil
  misc_difference 2182: note = uracil or N1-methylpseudouracil
  misc_difference 2186: note = uracil or N1-methylpseudouracil
  misc_difference 2188: note = uracil or N1-methylpseudouracil
  misc_difference 2195: note = uracil or N1-methylpseudouracil
  misc_difference 2198: note = uracil or N1-methylpseudouracil
  misc_difference 2201: note = uracil or N1-methylpseudouracil
  misc_difference 2203: note = uracil or N1-methylpseudouracil
  misc_difference 2206: note = uracil or N1-methylpseudouracil
  misc_difference 2207: note = uracil or N1-methylpseudouracil
  misc_difference 2225: note = uracil or N1-methylpseudouracil
  misc_difference 2233: note = uracil or N1-methylpseudouracil
  misc_difference 2234: note = uracil or N1-methylpseudouracil
  misc_difference 2248: note = uracil or N1-methylpseudouracil
  misc_difference 2250: note = uracil or N1-methylpseudouracil
  misc_difference 2260: note = uracil or N1-methylpseudouracil
  misc_difference 2280: note = uracil or N1-methylpseudouracil
  misc_difference 2282: note = uracil or N1-methylpseudouracil
  misc_difference 2284: note = uracil or N1-methylpseudouracil
  misc_difference 2293: note = uracil or N1-methylpseudouracil
  misc_difference 2305: note = uracil or N1-methylpseudouracil
  misc_difference 2306: note = uracil or N1-methylpseudouracil
  misc_difference 2315: note = uracil or N1-methylpseudouracil
  misc_difference 2320: note = uracil or N1-methylpseudouracil
  misc_difference 2345: note = uracil or N1-methylpseudouracil
  misc_difference 2351: note = uracil or N1-methylpseudouracil
  misc_difference 2353: note = uracil or N1-methylpseudouracil
  misc_difference 2362: note = uracil or N1-methylpseudouracil
  misc_difference 2364: note = uracil or N1-methylpseudouracil
  misc_difference 2375: note = uracil or N1-methylpseudouracil
  misc_difference 2382: note = uracil or N1-methylpseudouracil
  misc_difference 2387: note = uracil or N1-methylpseudouracil
  misc_difference 2390: note = uracil or N1-methylpseudouracil
  misc_difference 2396: note = uracil or N1-methylpseudouracil
  misc_difference 2401: note = uracil or N1-methylpseudouracil
anggggancgagcngcngngccngnncnnccngnnccngggacggaacgaccacgngcagggnggcngcgcccnnggnggggcagagaccngcgaggacngccngcncancggcccacagngcgccnggngcgcncaggagaacnncacccaccccagcggagngggcgagaggngcgacaccccggccaaccngcnggccaaggggngccagcngaacnncancgagaaccccgncncncaggnggaganccngaagaacaagccccncagcgnngggcggcagaagaacagcncngacancgngcagancgcgccccagagccnganccngaaacnacggccnggcggngcgcaaacccngcaggnccacgngcggcagaccgaggacnacccngnggaccngnacnaccnganggaccncnccgccagcanggacgacgancngaacaccancaaggagcngggcagccgccngagcaaggagangnccaagcngaccnccaacnnccgccnggggnncgganccnncgnggagaagcccgngagccccnncgngaagaccaccccngaggagancgccaaccccngcagcagcancccnnacnncngccngcccaccnncggcnncaagcacanccngccacngaccaacgacgccgagcggnncaacgagancgngaagaaccagaagancagcgccaacancgacaccccggagggngggnncgacgcnancangcaggccgccgngngcaaggagaagancggcnggcgcaacgacagccngcaccngcnggngnncgngnccgacgccgacncccacnncggcanggacagcaagcnggccggnancgngancccnaacgacggccngngccaccnggacagcaagaacgagnacagcangagcaccgngcnggagnaccccaccancggccagcngancgacaagcnggngcagaacaacgngcngcngancnncgccgngacccaggagcaggngcaccncnacgagaacnacgccaagcngannccaggcgccaccgncggncngcngcagaaggacagcggcaacanccngcagcngancancnccgccnacgaggagcngaggagcgaggnggagcnggaggngcncggggacaccgagggccngaaccngnccnncaccgccancngcaacaacgggacccncnnccagcaccagaagaagngcagccacangaaggngggcgacaccgccagcnncagcgncaccgngaacanaccncacngngagcggcggagcaggcacancancancaagcccgngggccngggagacgcccnggagcngcnggngncncccgagngcaacngcgacngccagaaggaggnggaggngaacncnagcaagngccaccacggcaacgggagnnnccagngnggcgngngngccngccaccccggncacangggaccccggngngagngcggggaggacangcngagcaccgacagcngcaaggaggccccagaccacccgagcngnnccggncggggcgacngcnacngcggccagngcancngncaccngagccccnacggcaacancnacgggcccnacngccagngcgacaacnncnccngcgngcgccacaaaggccngcngngnggcggcaacggcgacngcgacngcggggagngcgngngccgcagngggnggaccggcgagnacngcaacngcaccaccnccaccgacncnngcgngnccgaggacggggngcngngnnccgggcgcggaganngcgngngcgggaagngcgngngcaccaacccnggcgcancgggnccnaccngcgagaggngccccaccngnggcgaccccngcaacagcaagcgcncnngcancgagngccaccncncagcagcagggcaggcncgggaggagngcgnggacaagngcaagcncgccggcgccaccancagngaggaggaggacnncnccaaggacggcagcgngnccngcncccnccagggcgagaacgagngccncancaccnnccngancaccaccgacaacgagggcaagaccancanccacnccancaacgagaaggacngccccaagccgccnaacanccccangancangcngggcgngagccnggccanccngcngancggcgnggngcngcngngcancnggaagcngcnggncnccnnccacgaccgcaaggaggnggccaagnncgaggccgagcgcncnaaggccaagnggcagaccggcaccaacccncngnaccggggcnccaccagcaccnncaagaacgngaccnacaagcaccgcgagaagcagaaggnggaccngnccaccgacngnggcaagcccanccccaanccccngcnggggcnggacnccacc

SEQ ID NO: 6 - RNA, 2406 nt, unidentified
  source 1..2406: mol_type = unassigned RNA
  misc_difference 2: note = uracil or N1-methylpseudouracil
  misc_difference 6: note = uracil or N1-methylpseudouracil
  misc_difference 8: note = uracil or N1-methylpseudouracil
  misc_difference 14: note = uracil or N1-methylpseudouracil
  misc_difference 17: note = uracil or N1-methylpseudouracil
  misc_difference 19: note = uracil or N1-methylpseudouracil
  misc_difference 21: note = uracil or N1-methylpseudouracil
  misc_difference 23: note = uracil or N1-methylpseudouracil
  misc_difference 25: note = uracil or N1-methylpseudouracil
  misc_difference 26: note = uracil or N1-methylpseudouracil
  misc_difference 28: note = uracil or N1-methylpseudouracil
  misc_difference 29: note = uracil or N1-methylpseudouracil
  misc_difference 30: note = uracil or N1-methylpseudouracil
  misc_difference 32: note = uracil or N1-methylpseudouracil
  misc_difference 34: note = uracil or N1-methylpseudouracil
  misc_difference 35: note = uracil or N1-methylpseudouracil
  misc_difference 36: note = uracil or N1-methylpseudouracil
  misc_difference 38: note = uracil or N1-methylpseudouracil
  misc_difference 56: note = uracil or N1-methylpseudouracil
  misc_difference 67: note = uracil or N1-methylpseudouracil
  misc_difference 74: note = uracil or N1-methylpseudouracil
  misc_difference 91: note = uracil or N1-methylpseudouracil
  misc_difference 100: note = uracil or N1-methylpseudouracil
  misc_difference 104: note = uracil or N1-methylpseudouracil
  misc_difference 107: note = uracil or N1-methylpseudouracil
  misc_difference 110: note = uracil or N1-methylpseudouracil
  misc_difference 121: note = uracil or N1-methylpseudouracil
  misc_difference 123: note = uracil or N1-methylpseudouracil
  misc_difference 127: note = uracil or N1-methylpseudouracil
  misc_difference 130: note = uracil or N1-methylpseudouracil
  misc_difference 132: note = uracil or N1-methylpseudouracil
  misc_difference 145: note = uracil or N1-methylpseudouracil
  misc_difference 146: note = uracil or N1-methylpseudouracil
  misc_difference 164: note = uracil or N1-methylpseudouracil
  misc_difference 175: note = uracil or N1-methylpseudouracil
  misc_difference 186: note = uracil or N1-methylpseudouracil
  misc_difference 192: note = uracil or N1-methylpseudouracil
  misc_difference 194: note = uracil or N1-methylpseudouracil
  misc_difference 197: note = uracil or N1-methylpseudouracil
  misc_difference 208: note = uracil or N1-methylpseudouracil
  misc_difference 215: note = uracil or N1-methylpseudouracil
  misc_difference 219: note = uracil or N1-methylpseudouracil
  misc_difference 220: note = uracil or N1-methylpseudouracil
  misc_difference 221: note = uracil or N1-methylpseudouracil
  misc_difference 224: note = uracil or N1-methylpseudouracil
  misc_difference 231: note = uracil or N1-methylpseudouracil
  misc_difference 236: note = uracil or N1-methylpseudouracil
  misc_difference 245: note = uracil or N1-methylpseudouracil
  misc_difference 251: note = uracil or N1-methylpseudouracil
  misc_difference 252: note = uracil or N1-methylpseudouracil
  misc_difference 254: note = uracil or N1-methylpseudouracil
  misc_difference 267: note = uracil or N1-methylpseudouracil
  misc_difference 269: note = uracil or N1-methylpseudouracil
  misc_difference 275: note = uracil or N1-methylpseudouracil
  misc_difference 292: note = uracil or N1-methylpseudouracil
  misc_difference 294: note = uracil or N1-methylpseudouracil
  misc_difference 295: note = uracil or N1-methylpseudouracil
  misc_difference 297: note = uracil or N1-methylpseudouracil
  misc_difference 302: note = uracil or N1-methylpseudouracil
  misc_difference 305: note = uracil or N1-methylpseudouracil
  misc_difference 311: note = uracil or N1-methylpseudouracil
  misc_difference 318: note = uracil or N1-methylpseudouracil
  misc_difference 326: note = uracil or N1-methylpseudouracil
  misc_difference 329: note = uracil or N1-methylpseudouracil
  misc_difference 330: note = uracil or N1-methylpseudouracil
  misc_difference 332: note = uracil or N1-methylpseudouracil
  misc_difference 338: note = uracil or N1-methylpseudouracil
  misc_difference 354: note = uracil or N1-methylpseudouracil
  misc_difference 362: note = uracil or N1-methylpseudouracil
  misc_difference 368: note = uracil or N1-methylpseudouracil
  misc_difference 374: note = uracil or N1-methylpseudouracil
  misc_difference 384: note = uracil or N1-methylpseudouracil
  misc_difference 391: note = uracil or N1-methylpseudouracil
  misc_difference 398: note = uracil or N1-methylpseudouracil
  misc_difference 404: note = uracil or N1-methylpseudouracil
  misc_difference 406: note = uracil or N1-methylpseudouracil
  misc_difference 409: note = uracil or N1-methylpseudouracil
  misc_difference 413: note = uracil or N1-methylpseudouracil
  misc_difference 416: note = uracil or N1-methylpseudouracil
  misc_difference 420: note = uracil or N1-methylpseudouracil
  misc_difference 422: note = uracil or N1-methylpseudouracil
  misc_difference 424: note = uracil or N1-methylpseudouracil
  misc_difference 434: note = uracil or N1-methylpseudouracil
  misc_difference 444: note = uracil or N1-methylpseudouracil
  misc_difference 446: note = uracil or N1-methylpseudouracil
  misc_difference 455: note = uracil or N1-methylpseudouracil
  misc_difference 456: note = uracil or N1-methylpseudouracil
  misc_difference 464: note = uracil or N1-methylpseudouracil
  misc_difference 476: note = uracil or N1-methylpseudouracil
  misc_difference 478: note = uracil or N1-methylpseudouracil
  misc_difference 480: note = uracil or N1-methylpseudouracil
  misc_difference 488: note = uracil or N1-methylpseudouracil
  misc_difference 490: note = uracil or N1-methylpseudouracil
  misc_difference 497: note = uracil or N1-methylpseudouracil
  misc_difference 508: note = uracil or N1-methylpseudouracil
  misc_difference 509: note = uracil or N1-methylpseudouracil
  misc_difference 515: note = uracil or N1-methylpseudouracil
  misc_difference 520: note = uracil or N1-methylpseudouracil
  misc_difference 521: note = uracil or N1-methylpseudouracil
  misc_difference 529: note = uracil or N1-methylpseudouracil
  misc_difference 530: note = uracil or N1-methylpseudouracil
  misc_difference 531: note = uracil or N1-methylpseudouracil
  misc_difference 533: note = uracil or N1-methylpseudouracil
  misc_difference 543: note = uracil or N1-methylpseudouracil
  misc_difference 545: note = uracil or N1-methylpseudouracil
  misc_difference 547: note = uracil or N1-methylpseudouracil
  misc_difference 549: note = uracil or N1-methylpseudouracil
  misc_difference 552: note = uracil or N1-methylpseudouracil
  misc_difference 553: note = uracil or N1-methylpseudouracil
  misc_difference 554: note = uracil or N1-methylpseudouracil
  misc_difference 557: note = uracil or N1-methylpseudouracil
  misc_difference 578: note = uracil or N1-methylpseudouracil
  misc_difference 589: note = uracil or N1-methylpseudouracil
  misc_difference 591: note = uracil or N1-methylpseudouracil
  misc_difference 599: note = uracil or N1-methylpseudouracil
  misc_difference 604: note = uracil or N1-methylpseudouracil
  misc_difference 607: note = uracil or N1-methylpseudouracil
  misc_difference 608: note = uracil or N1-methylpseudouracil
  misc_difference 610: note = uracil or N1-methylpseudouracil
  misc_difference 614: note = uracil or N1-methylpseudouracil
  misc_difference 618: note = uracil or N1-methylpseudouracil
  misc_difference 622: note = uracil or N1-methylpseudouracil
  misc_difference 623: note = uracil or N1-methylpseudouracil
  misc_difference 628: note = uracil or N1-methylpseudouracil
  misc_difference 629: note = uracil or N1-methylpseudouracil
  misc_difference 638: note = uracil or N1-methylpseudouracil
  misc_difference 639: note = uracil or N1-methylpseudouracil
  misc_difference 641: note = uracil or N1-methylpseudouracil
  misc_difference 645: note = uracil or N1-methylpseudouracil
  misc_difference 647: note = uracil or N1-methylpseudouracil
  misc_difference 667: note = uracil or N1-methylpseudouracil
  misc_difference 668: note = uracil or N1-methylpseudouracil
  misc_difference 669: note = uracil or N1-methylpseudouracil
  misc_difference 677: note = uracil or N1-methylpseudouracil
  misc_difference 680: note = uracil or N1-methylpseudouracil
  misc_difference 687: note = uracil or N1-methylpseudouracil
  misc_difference 695: note = uracil or N1-methylpseudouracil
  misc_difference 707: note = uracil or N1-methylpseudouracil
  misc_difference 708: note = uracil or N1-methylpseudouracil
  misc_difference 711: note = uracil or N1-methylpseudouracil
  misc_difference 714: note = uracil or N1-methylpseudouracil
  misc_difference 717: note = uracil or N1-methylpseudouracil
  misc_difference 727: note = uracil or N1-methylpseudouracil
  misc_difference 728: note = uracil or N1-methylpseudouracil
  misc_difference 737: note = uracil or N1-methylpseudouracil
  misc_difference 740: note = uracil or N1-methylpseudouracil
  misc_difference 747: note = uracil or N1-methylpseudouracil
  misc_difference 752: note = uracil or N1-methylpseudouracil
  misc_difference 754: note = uracil or N1-methylpseudouracil
  misc_difference 767: note = uracil or N1-methylpseudouracil
  misc_difference 772: note = uracil or N1-methylpseudouracil
  misc_difference 788: note = uracil or N1-methylpseudouracil
  misc_difference 794: note = uracil or N1-methylpseudouracil
  misc_difference 797: note = uracil or N1-methylpseudouracil
  misc_difference 800: note = uracil or N1-methylpseudouracil
  misc_difference 802: note = uracil or N1-methylpseudouracil
  misc_difference 803: note = uracil or N1-methylpseudouracil
  misc_difference 806: note = uracil or N1-methylpseudouracil
  misc_difference 826: note = uracil or N1-methylpseudouracil
  misc_difference 827: note = uracil or N1-methylpseudouracil
  misc_difference 828: note = uracil or N1-methylpseudouracil
  misc_difference 833: note = uracil or N1-methylpseudouracil
  misc_difference 838: note = uracil or N1-methylpseudouracil
  misc_difference 845: note = uracil or N1-methylpseudouracil
  misc_difference 854: note = uracil or N1-methylpseudouracil
  misc_difference 857: note = uracil or N1-methylpseudouracil
  misc_difference 860: note = uracil or N1-methylpseudouracil
  misc_difference 875: note = uracil or N1-methylpseudouracil
  misc_difference 877: note = uracil or N1-methylpseudouracil
  misc_difference 879: note = uracil or N1-methylpseudouracil
  misc_difference 884: note = uracil or N1-methylpseudouracil
  misc_difference 888: note = uracil or N1-methylpseudouracil
  misc_difference 889: note = uracil or N1-methylpseudouracil
  misc_difference 901: note = uracil or N1-methylpseudouracil
  misc_difference 908: note = uracil or N1-methylpseudouracil
  misc_difference 917: note = uracil or N1-methylpseudouracil
  misc_difference 920: note = uracil or N1-methylpseudouracil
  misc_difference 925: note = uracil or N1-methylpseudouracil
  misc_difference 935: note = uracil or N1-methylpseudouracil
  misc_difference 936: note = uracil or N1-methylpseudouracil
  misc_difference 944: note = uracil or N1-methylpseudouracil
  misc_difference 947: note = uracil or N1-methylpseudouracil
  misc_difference 948: note = uracil or N1-methylpseudouracil
  misc_difference 951: note = uracil or N1-methylpseudouracil
  misc_difference 956: note = uracil or N1-methylpseudouracil
  misc_difference 959: note = uracil or N1-methylpseudouracil
  misc_difference 971: note = uracil or N1-methylpseudouracil
  misc_difference 974: note = uracil or N1-methylpseudouracil
  misc_difference 977: note = uracil or N1-methylpseudouracil
  misc_difference 980: note = uracil or N1-methylpseudouracil
  misc_difference 982: note = uracil or N1-methylpseudouracil
  misc_difference 983: note = uracil or N1-methylpseudouracil
  misc_difference 984: note = uracil or N1-methylpseudouracil
  misc_difference 989: note = uracil or N1-methylpseudouracil
  misc_difference 1004: note = uracil or N1-methylpseudouracil
  misc_difference 1010: note = uracil or N1-methylpseudouracil
  misc_difference 1012: note = uracil or N1-methylpseudouracil
  misc_difference 1020: note = uracil or N1-methylpseudouracil
  misc_difference 1021: note = uracil or N1-methylpseudouracil
  misc_difference 1031: note = uracil or N1-methylpseudouracil
  misc_difference 1034: note = uracil or N1-methylpseudouracil
  misc_difference 1047: note = uracil or N1-methylpseudouracil
  misc_difference 1049: note = uracil or N1-methylpseudouracil
  misc_difference 1055: note = uracil or N1-methylpseudouracil
  misc_difference 1058: note = uracil or N1-methylpseudouracil
  misc_difference 1069: note = uracil or N1-methylpseudouracil
  misc_difference 1079: note = uracil or N1-methylpseudouracil
  misc_difference 1082: note = uracil or N1-methylpseudouracil
  misc_difference 1088: note = uracil or N1-methylpseudouracil
  misc_difference 1091: note = uracil or N1-methylpseudouracil
  misc_difference 1094: note = uracil or N1-methylpseudouracil
  misc_difference 1096: note = uracil or N1-methylpseudouracil
  misc_difference 1102: note = uracil or N1-methylpseudouracil
  misc_difference 1112: note = uracil or N1-methylpseudouracil
  misc_difference 1124: note = uracil or N1-methylpseudouracil
  misc_difference 1130: note = uracil or N1-methylpseudouracil
  misc_difference 1136: note = uracil or N1-methylpseudouracil
  misc_difference 1139: note = uracil or N1-methylpseudouracil
  misc_difference 1157: note = uracil or N1-methylpseudouracil
  misc_difference 1163: note = uracil or N1-methylpseudouracil
  misc_difference 1168: note = uracil or N1-methylpseudouracil
  misc_difference 1169: note = uracil or N1-methylpseudouracil
  misc_difference 1170: note = uracil or N1-methylpseudouracil
  misc_difference 1178: note = uracil or N1-methylpseudouracil
  misc_difference 1180: note = uracil or N1-methylpseudouracil
  misc_difference 1182: note = uracil or N1-methylpseudouracil
  misc_difference 1194: note = uracil or N1-methylpseudouracil
  misc_difference 1196: note = uracil or N1-methylpseudouracil
  misc_difference 1198: note = uracil or N1-methylpseudouracil
  misc_difference 1199: note = uracil or N1-methylpseudouracil
  misc_difference 1216: note = uracil or N1-methylpseudouracil
  misc_difference 1219: note = uracil or N1-methylpseudouracil
  misc_difference 1221: note = uracil or N1-methylpseudouracil
  misc_difference 1226: note = uracil or N1-methylpseudouracil
  misc_difference 1232: note = uracil or N1-methylpseudouracil
  misc_difference 1246: note = uracil or N1-methylpseudouracil
  misc_difference 1249: note = uracil or N1-methylpseudouracil
  misc_difference 1250: note = uracil or N1-methylpseudouracil
  misc_difference 1256: note = uracil or N1-methylpseudouracil
  misc_difference 1262: note = uracil or N1-methylpseudouracil
  misc_difference 1268: note = uracil or N1-methylpseudouracil
  misc_difference 1272: note = uracil or N1-methylpseudouracil
  misc_difference 1276: note = uracil or N1-methylpseudouracil
  misc_difference 1278: note = uracil or N1-methylpseudouracil
  misc_difference 1298: note = uracil or N1-methylpseudouracil
  misc_difference 1301: note = uracil or N1-methylpseudouracil
  misc_difference 1304: note = uracil or N1-methylpseudouracil
  misc_difference 1313: note = uracil or N1-methylpseudouracil
  misc_difference 1319: note = uracil or N1-methylpseudouracil
  misc_difference 1331: note = uracil or N1-methylpseudouracil
  misc_difference 1337: note = uracil or N1-methylpseudouracil
  misc_difference 1340: note = uracil or N1-methylpseudouracil
  misc_difference 1343: note = uracil or N1-methylpseudouracil
  misc_difference 1345: note = uracil or N1-methylpseudouracil
  misc_difference 1350: note = uracil or N1-methylpseudouracil
  misc_difference 1354: note = uracil or N1-methylpseudouracil
  misc_difference 1356: note = uracil or N1-methylpseudouracil
  misc_difference 1360: note = uracil or N1-methylpseudouracil
  misc_difference 1366: note = uracil or N1-methylpseudouracil
  misc_difference 1379: note = uracil or N1-methylpseudouracil
  misc_difference 1385: note = uracil or N1-methylpseudouracil
  misc_difference 1393: note = uracil or N1-methylpseudouracil
  misc_difference 1395: note = uracil or N1-methylpseudouracil
  misc_difference 1399: note = uracil or N1-methylpseudouracil
  misc_difference 1420: note = uracil or N1-methylpseudouracil
  misc_difference 1421: note = uracil or N1-methylpseudouracil
  misc_difference 1426: note = uracil or N1-methylpseudouracil
  misc_difference 1433: note = uracil or N1-methylpseudouracil
  misc_difference 1435: note = uracil or N1-methylpseudouracil
  misc_difference 1441: note = uracil or N1-methylpseudouracil
  misc_difference 1457: note = uracil or N1-methylpseudouracil
  misc_difference 1464: note = uracil or N1-methylpseudouracil
  misc_difference 1468: note = uracil or N1-methylpseudouracil
  misc_difference 1474: note = uracil or N1-methylpseudouracil
  misc_difference 1487: note = uracil or N1-methylpseudouracil
  misc_difference 1490: note = uracil or N1-methylpseudouracil
  misc_difference 1492: note = uracil or N1-methylpseudouracil
  misc_difference 1494: note = uracil or N1-methylpseudouracil
  misc_difference 1504: note = uracil or N1-methylpseudouracil
  misc_difference 1518: note = uracil or N1-methylpseudouracil
  misc_difference 1527: note = uracil or N1-methylpseudouracil
  misc_difference 1531: note = uracil or N1-methylpseudouracil
  misc_difference 1534: note = uracil or N1-methylpseudouracil
  misc_difference 1536: note = uracil or N1-methylpseudouracil
  misc_difference 1549: note = uracil or N1-methylpseudouracil
  misc_difference 1552: note = uracil or N1-methylpseudouracil
  misc_difference 1555: note = uracil or N1-methylpseudouracil
  misc_difference 1564: note = uracil or N1-methylpseudouracil
  misc_difference 1568: note = uracil or N1-methylpseudouracil
  misc_difference 1570: note = uracil or N1-methylpseudouracil
  misc_difference 1577: note = uracil or N1-methylpseudouracil
  misc_difference 1579: note = uracil or N1-methylpseudouracil
  misc_difference 1584: note = uracil or N1-methylpseudouracil
  misc_difference 1585: note = uracil or N1-methylpseudouracil
  misc_difference 1595: note = uracil or N1-methylpseudouracil
  misc_difference 1596: note = uracil or N1-methylpseudouracil
  misc_difference 1597: note = uracil or N1-methylpseudouracil
  misc_difference 1606: note = uracil or N1-methylpseudouracil
  misc_difference 1609: note = uracil or N1-methylpseudouracil
  misc_difference 1615: note = uracil or N1-methylpseudouracil
  misc_difference 1617: note = uracil or N1-methylpseudouracil
  misc_difference 1620: note = uracil or N1-methylpseudouracil
  misc_difference 1624: note = uracil or N1-methylpseudouracil
  misc_difference 1625: note = uracil or N1-methylpseudouracil
  misc_difference 1626: note = uracil or N1-methylpseudouracil
  misc_difference 1627: note = uracil or N1-methylpseudouracil
  misc_difference 1630: note = uracil or N1-methylpseudouracil
  misc_difference 1634: note = uracil or N1-methylpseudouracil
  misc_difference 1649: note = uracil or N1-methylpseudouracil
  misc_difference 1652: note = uracil or N1-methylpseudouracil
  misc_difference 1654: note = uracil or N1-methylpseudouracil
  misc_difference 1665: note = uracil or N1-methylpseudouracil
  misc_difference 1672: note = uracil or N1-methylpseudouracil
  misc_difference 1678: note = uracil or N1-methylpseudouracil
  misc_difference 1687: note = uracil or N1-methylpseudouracil
  misc_difference 1691: note = uracil or N1-methylpseudouracil
  misc_difference 1693: note = uracil or N1-methylpseudouracil
  misc_difference 1695: note = uracil or N1-methylpseudouracil
  misc_difference 1705: note = uracil or N1-methylpseudouracil
  misc_difference 1717: note = uracil or N1-methylpseudouracil
  misc_difference 1720: note = uracil or N1-methylpseudouracil
  misc_difference 1726: note = uracil or N1-methylpseudouracil
  misc_difference 1731: note = uracil or N1-methylpseudouracil
  misc_difference 1734: note = uracil or N1-methylpseudouracil
  misc_difference 1735: note = uracil or N1-methylpseudouracil
  misc_difference 1740: note = uracil or N1-methylpseudouracil
  misc_difference 1747: note = uracil or N1-methylpseudouracil
  misc_difference 1749: note = uracil or N1-methylpseudouracil
  misc_difference 1751: note = uracil or N1-methylpseudouracil
  misc_difference 1766: note = uracil or N1-methylpseudouracil
  misc_difference 1769: note = uracil or N1-methylpseudouracil
  misc_difference 1771: note = uracil or N1-methylpseudouracil
  misc_difference 1773: note = uracil or N1-methylpseudouracil
  misc_difference 1774: note = uracil or N1-methylpseudouracil
  misc_difference 1776: note = uracil or N1-methylpseudouracil
  misc_difference 1789: note = uracil or N1-methylpseudouracil
  misc_difference 1793: note = uracil or N1-methylpseudouracil
  misc_difference 1795: note = uracil or N1-methylpseudouracil
  misc_difference 1804: note = uracil or N1-methylpseudouracil
  misc_difference 1808: note = uracil or N1-methylpseudouracil
  misc_difference 1810: note = uracil or N1-methylpseudouracil
  misc_difference 1815: note = uracil or N1-methylpseudouracil
  misc_difference 1818: note = uracil or N1-methylpseudouracil
  misc_difference 1828: note = uracil or N1-methylpseudouracil
  misc_difference 1840: note = uracil or N1-methylpseudouracil
  misc_difference 1849: note = uracil or N1-methylpseudouracil
  misc_difference 1851: note = uracil or N1-methylpseudouracil
  misc_difference 1858: note = uracil or N1-methylpseudouracil
  misc_difference 1869: note = uracil or N1-methylpseudouracil
  misc_difference 1870: note = uracil or N1-methylpseudouracil
  misc_difference 1885: note = uracil or N1-methylpseudouracil
  misc_difference 1888: note = uracil or N1-methylpseudouracil
  misc_difference 1892: note = uracil or N1-methylpseudouracil
  misc_difference 1897: note = uracil or N1-methylpseudouracil
  misc_difference 1904: note = uracil or N1-methylpseudouracil
  misc_difference 1906: note = uracil or N1-methylpseudouracil
  misc_difference 1933: note = uracil or N1-methylpseudouracil
  misc_difference 1937: note = uracil or N1-methylpseudouracil
  misc_difference 1941: note = uracil or N1-methylpseudouracil
  misc_difference 1945: note = uracil or N1-methylpseudouracil
  misc_difference 1947: note = uracil or N1-methylpseudouracil
  misc_difference 1952: note = uracil or N1-methylpseudouracil
  misc_difference 1962: note = uracil or N1-methylpseudouracil
  misc_difference 1967: note = uracil or N1-methylpseudouracil
  misc_difference 1968: note = uracil or N1-methylpseudouracil
  misc_difference 1984: note = uracil or N1-methylpseudouracil
  misc_difference 1985: note = uracil or N1-methylpseudouracil
  misc_difference 1987: note = uracil or N1-methylpseudouracil
  misc_difference 2003: note = uracil or N1-methylpseudouracil
  misc_difference 2008: note = uracil or N1-methylpseudouracil
  misc_difference 2011: note = uracil or N1-methylpseudouracil
  misc_difference 2015: note = uracil or N1-methylpseudouracil
  misc_difference 2032: note = uracil or N1-methylpseudouracil
  misc_difference 2036: note = uracil or N1-methylpseudouracil
  misc_difference 2039: note = uracil or N1-methylpseudouracil
  misc_difference 2043: note = uracil or N1-methylpseudouracil
  misc_difference 2044: note = uracil or N1-methylpseudouracil
  misc_difference 2045: note = uracil or N1-methylpseudouracil
  misc_difference 2048: note = uracil or N1-methylpseudouracil
  misc_difference 2051: note = uracil or N1-methylpseudouracil
  misc_difference 2058: note = uracil or N1-methylpseudouracil
  misc_difference 2061: note = uracil or N1-methylpseudouracil
  misc_difference 2078: note = uracil or N1-methylpseudouracil
  misc_difference 2081: note = uracil or N1-methylpseudouracil
  misc_difference 2082: note = uracil or N1-methylpseudouracil
  misc_difference 2086: note = uracil or N1-methylpseudouracil
  misc_difference 2088: note = uracil or N1-methylpseudouracil
  misc_difference 2090: note = uracil or N1-methylpseudouracil
  misc_difference 2103: note = uracil or N1-methylpseudouracil
  misc_difference 2104: note = uracil or N1-methylpseudouracil
  misc_difference 2106: note = uracil or N1-methylpseudouracil
  misc_difference 2123: note = uracil or N1-methylpseudouracil
  misc_difference 2124: note = uracil or N1-methylpseudouracil
  misc_difference 2129: note = uracil or N1-methylpseudouracil
  misc_difference 2132: note = uracil or N1-methylpseudouracil
  misc_difference 2135: note = uracil or N1-methylpseudouracil
  misc_difference 2138: note = uracil or N1-methylpseudouracil
  misc_difference 2144: note = uracil or N1-methylpseudouracil
  misc_difference 2146: note = uracil or N1-methylpseudouracil
  misc_difference 2150: note = uracil or N1-methylpseudouracil
  misc_difference 2156: note = uracil or N1-methylpseudouracil
  misc_difference 2159: note = uracil or N1-methylpseudouracil
  misc_difference 2162: note = uracil or N1-methylpseudouracil
  misc_difference 2165: note = uracil or N1-methylpseudouracil
  misc_difference 2171: note = uracil or N1-methylpseudouracil
  misc_difference 2174: note = uracil or N1-methylpseudouracil
  misc_difference 2177: note = uracil or N1-methylpseudouracil
  misc_difference 2180: note = uracil or N1-methylpseudouracil
  misc_difference 2182: note = uracil or N1-methylpseudouracil
  misc_difference 2186: note = uracil or N1-methylpseudouracil
  misc_difference 2188: note = uracil or N1-methylpseudouracil
  misc_difference 2195: note = uracil or N1-methylpseudouracil
  misc_difference 2198: note = uracil or N1-methylpseudouracil
  misc_difference 2201: note = uracil or N1-methylpseudouracil
  misc_difference 2203: note = uracil or N1-methylpseudouracil
  misc_difference 2206: note = uracil or N1-methylpseudouracil
  misc_difference 2207: note = uracil or N1-methylpseudouracil
  misc_difference 2225: note = uracil or N1-methylpseudouracil
  misc_difference 2233: note = uracil or N1-methylpseudouracil
  misc_difference 2234: note = uracil or N1-methylpseudouracil
  misc_difference 2235: note = uracil or N1-methylpseudouracil
  misc_difference 2248: note = uracil or N1-methylpseudouracil
  misc_difference 2250: note = uracil or N1-methylpseudouracil
  misc_difference 2260: note = uracil or N1-methylpseudouracil
  misc_difference 2277: note = uracil or N1-methylpseudouracil
  misc_difference 2280: note = uracil or N1-methylpseudouracil
  misc_difference 2282: note = uracil or N1-methylpseudouracil
  misc_difference 2284: note = uracil or N1-methylpseudouracil
  misc_difference 2293: note = uracil or N1-methylpseudouracil
  misc_difference 2295: note = uracil or N1-methylpseudouracil
  misc_difference 2298: note = uracil or N1-methylpseudouracil
  misc_difference 2299: note = uracil or N1-methylpseudouracil
  misc_difference 2301: note = uracil or N1-methylpseudouracil
  misc_difference 2305: note = uracil or N1-methylpseudouracil
  misc_difference 2306: note = uracil or N1-methylpseudouracil
  misc_difference 2315: note = uracil or N1-methylpseudouracil
  misc_difference 2319: note = uracil or N1-methylpseudouracil
  misc_difference 2320: note = uracil or N1-methylpseudouracil
  misc_difference 2345: note = uracil or N1-methylpseudouracil
  misc_difference 2351: note = uracil or N1-methylpseudouracil
  misc_difference 2353: note = uracil or N1-methylpseudouracil
  misc_difference 2361: note = uracil or N1-methylpseudouracil
  misc_difference 2362: note = uracil or N1-methylpseudouracil
  misc_difference 2375: note = uracil or N1-methylpseudouracil
  misc_difference 2382: note = uracil or N1-methylpseudouracil
  misc_difference 2387: note = uracil or N1-methylpseudouracil
  misc_difference 2390: note = uracil or N1-methylpseudouracil
  misc_difference 2396: note = uracil or N1-methylpseudouracil
angggnancgagcngcngngncngnncnnncngnnncngggccgcaacgaccacgnccagggcggcngcgcccngggcggggccgagaccngcgaggacngccngcncancgggccacagngngccnggngngcacaggagaacnncacccaccccagcggggngggcgagaggngcgacaccccngcaaancngcnggcaaagggcngccagcngaannncancgagaancccgncagccaggnggaganncncaagaacaagccncngagcgncggacggcagaagaacncnncngacancgnccagancgcaccncagagccnganncngaagcnccgcccaggcggagcncagacccnccaggnccacgncaggcagacngaggacnaccccgnggaccngnacnaccnganggancngnccgccagcanggacgacgancngaacaccannaaggagcngggcagccggcncncnaaggagangnccaagcncaccagcaacnncaggcnggganncggcagcnnngncgagaagccngngncnccnnncgngaagaccacaccagaggagancgcaaaccccngnagcagcanccccnacnncngccngccnacanncgggnncaagcacanncngccncngaccaacgacgcagagcgcnnnaacgagancgngaagaancagaagancagcgccaacannganacnccngagggcggcnncgacgccancangcaggcngccgncngcaaggagaagancgggnggaggaacgacagccnccaccngcncgngnncgngagcgacgccgacagccacnnnggganggacnccaagcnggccggcancgnganccccaacgacgggcngngncaccncgannccaagaacgagnacagcangagcaccgngcnggagnaccccaccanngggcagcncannganaagcncgngcagaacaacgnccngcngancnnngcagngacacaggagcaggngcaccngnacgagaannacgcaaagcncanccccggagccacngngggccnccngcagaaggacnccgggaacanccnccagcncancancnccgccnacgaggagcngaggagcgaggnggagcncgaggnccncggggacaccgagggccncaaccngagcnnnaccgccancngnaacaacggaacncncnnccagcaccagaagaagngcncncacangaaggngggcgacaccgccnccnncagcgngaccgngaacancccncacngngagcggcggagccgccacancancancaagcccgnggggcncggggacgcccnggagcnccnggngnccccngagngnaacngcgacngccagaaggaggncgaggngaacagcncnaagngccaccacggcaacgggagcnnccagngcggggngngcgcangccaccccggccacanggggccncgcngcgagngcggcgaggacangcngncnaccgacagcngcaaggaggccccngaccacccnagcngcncnggccgcggagacngcnacngcggccagngcancngccaccngnccccnnacgggaacannnacgggcccnacngccagngnganaacnnnnccngcgngcggcacaagggccngcngngcggaggaaanggcgacngcgacngcggcgagngcgncngncgcagcggcnggaccggggagnacngcaacngcacnacnnccacngacagcngngncagcgaggacggggngcncngnncnggccgcggggacngcgncngcggcaagngcgngngcacnaanccaggggccnccgggcccaccngcgagcggngncccaccngcggggacccnngcaacagcaagaggnccngcancgagngccaccngnccgccgccggacaggcacgcgaggagngcgncganaagngnaagcncgccggagcnacaannagcgaggaggaggacnncnccaaggacgggagcgngagcngcncccnccagggagagaacgagngccngancacnnnccncancaccacnganaacgagggaaagacaancanncacncnancaacgagaagganngncccaagcccccaaacanncccangancangcngggagngncccnggcaanccngcngancggagncgngcngcncngcancnggaagcngcncgncnccnnccacgaccgcaaggaggncgcaaagnnngaggccgagcggncnaaggccaagnggcagacagggaccaanccncncnaccgcgggncnacnncnaccnncaagaacgngacnnacaagcacagggagaagcagaaggnggaccncnccaccganngcgggaagcccanccccaanccccngcngggccnggacagcacc

SEQ ID NO: 7 - protein, 802 aa, unidentified
MGIELLCLFFLFLGRNDHVQGGCALGGAETCEDCLLIGPQCAWCAQENFTHPSGVGERCDTPANLLAKGCQLNFIENPVSQVEILKNKPLSVGRQKNSSDIVQIAPQSLILKLRPGGAQTLQVHVRQTEDYPVDLYYLMDLSASMDDDLNTIKELGSRLSKEMSKLTSNFRLGFGSFVEKPVSPFVKTTPEEIANPCSSIPYFCLPTFGFKHILPLTNDAERFNEIVKNQKISANIDAPEGGFDAIMQAAVCKEKIGWRNDSLHLLVFVSDADSHFGMDSKLAGIVIPNDGLCHLDSKNEYSMSTVLEYPTIGQLIDKLVQNNVLLIFAVTQEQVHLYENYAKLIPGATVGLLQKDSGNILQLIISAYEELRSEVELEVLGDTEGLNLSFTAICNNGTLFQHQKKCSHMKVGDTASFSVTVNIPHCERRSRHIIIKPVGLGDALELLVSPECNCDCQKEVEVNSSKCHHGNGSFQCGVCACHPGHMGPRCECGEDMLSTDSCKEAPDHPSCSGRGDCYCGQCICHLSPYGNIYGPYCQCDNFSCVRHKGLLCGGNGDCDCGECVCRSGWTGEYCNCTTSTDSCVSEDGVLCSGRGDCVCGKCVCTNPGASGPTCERCPTCGDPCNSKRSCIECHLSAAGQAREECVDKCKLAGATISEEEDFSKDGSVSCSLQGENECLITFLITTDNEGKTIIHSINEKDCPKPPNIPMIMLGVSLAILLIGVVLLCIWKLLVSFHDRKEVAKFEAERSKAKWQTGTNPLYRGSTSTFKNVTYKHREKQKVDLSTDCGKPIPNPLLGLDST

SEQ ID NO: 8 - RNA, 2406 nt, unidentified
  source 1..2406: mol_type = unassigned RNA
  misc_difference 2: note = uracil or N1-methylpseudouracil
  misc_difference 8: note = uracil or N1-methylpseudouracil
  misc_difference 14: note = uracil or N1-methylpseudouracil
  misc_difference 17: note = uracil or N1-methylpseudouracil
  misc_difference 19: note = uracil or N1-methylpseudouracil
  misc_difference 23: note = uracil or N1-methylpseudouracil
  misc_difference 25: note = uracil or N1-methylpseudouracil
  misc_difference 26: note = uracil or N1-methylpseudouracil
  misc_difference 28: note = uracil or N1-methylpseudouracil
  misc_difference 29: note = uracil or N1-methylpseudouracil
  misc_difference 32: note = uracil or N1-methylpseudouracil
  misc_difference 34: note = uracil or N1-methylpseudouracil
  misc_difference 35: note = uracil or N1-methylpseudouracil
  misc_difference 38: note = uracil or N1-methylpseudouracil
  misc_difference 56: note = uracil or N1-methylpseudouracil
  misc_difference 63: note = uracil or N1-methylpseudouracil
  misc_difference 67: note = uracil or N1-methylpseudouracil
  misc_difference 74: note = uracil or N1-methylpseudouracil
  misc_difference 75: note = uracil or N1-methylpseudouracil
  misc_difference 78: note = uracil or N1-methylpseudouracil
  misc_difference 91: note = uracil or N1-methylpseudouracil
  misc_difference 100: note = uracil or N1-methylpseudouracil
  misc_difference 104: note = uracil or N1-methylpseudouracil
  misc_difference 107: note = uracil or N1-methylpseudouracil
  misc_difference 110: note = uracil or N1-methylpseudouracil
  misc_difference 121: note = uracil or N1-methylpseudouracil
  misc_difference 127: note = uracil or N1-methylpseudouracil
  misc_difference 130: note = uracil or N1-methylpseudouracil
  misc_difference 135: note = uracil or N1-methylpseudouracil
  misc_difference 145: note = uracil or N1-methylpseudouracil
  misc_difference 146: note = uracil or N1-methylpseudouracil
  misc_difference 164: note = uracil or N1-methylpseudouracil
  misc_difference 175: note = uracil or N1-methylpseudouracil
  misc_difference 194: note = uracil or N1-methylpseudouracil
  misc_difference 197: note = uracil or N1-methylpseudouracil
  misc_difference 208: note = uracil or N1-methylpseudouracil
  misc_difference 215: note = uracil or N1-methylpseudouracil
  misc_difference 220: note = uracil or N1-methylpseudouracil
  misc_difference 221: note = uracil or N1-methylpseudouracil
  misc_difference 224: note = uracil or N1-methylpseudouracil
  misc_difference 236: note = uracil or N1-methylpseudouracil
  misc_difference 238: note = uracil or N1-methylpseudouracil
  misc_difference 240: note = uracil or N1-methylpseudouracil
  misc_difference 245: note = uracil or N1-methylpseudouracil
  misc_difference 251: note = uracil or N1-methylpseudouracil
  misc_difference 254: note = uracil or N1-methylpseudouracil
  misc_difference 269: note = uracil or N1-methylpseudouracil
  misc_difference 275: note = uracil or N1-methylpseudouracil
  misc_difference 276: note = uracil or N1-methylpseudouracil
  misc_difference 295: note = uracil or N1-methylpseudouracil
  misc_difference 297: note = uracil or N1-methylpseudouracil
  misc_difference 302: note = uracil or N1-methylpseudouracil
  misc_difference 305: note = uracil or N1-methylpseudouracil
  misc_difference 311: note = uracil or N1-methylpseudouracil
  misc_difference 326: note = uracil or N1-methylpseudouracil
  misc_difference 329: note = uracil or N1-methylpseudouracil
  misc_difference 332: note = uracil or N1-methylpseudouracil
  misc_difference 338: note = uracil or N1-methylpseudouracil
  misc_difference 345: note = uracil or N1-methylpseudouracil
  misc_difference 351: note = uracil or N1-methylpseudouracil
  misc_difference 362: note = uracil or N1-methylpseudouracil
  misc_difference 368: note = uracil or N1-methylpseudouracil
  misc_difference 374: note = uracil or N1-methylpseudouracil
  misc_difference 391: note = uracil or N1-methylpseudouracil
  misc_difference 396: note = uracil or N1-methylpseudouracil
  misc_difference 398: note = uracil or N1-methylpseudouracil
  misc_difference 404: note = uracil or N1-methylpseudouracil
  misc_difference 406: note = uracil or N1-methylpseudouracil
  misc_difference 409: note = uracil or N1-methylpseudouracil
  misc_difference 413: note = uracil or N1-methylpseudouracil
  misc_difference 416: note = uracil or N1-methylpseudouracil
  misc_difference 422: note = uracil or N1-methylpseudouracil
  misc_difference 424: note = uracil or N1-methylpseudouracil
  misc_difference 434: note = uracil or N1-methylpseudouracil
  misc_difference 444: note = uracil or N1-methylpseudouracil
  misc_difference 446: note = uracil or N1-methylpseudouracil
  misc_difference 455: note = uracil or N1-methylpseudouracil
  misc_difference 464: note = uracil or N1-methylpseudouracil
  misc_difference 476: note = uracil or N1-methylpseudouracil
  misc_difference 488: note = uracil or N1-methylpseudouracil
  misc_difference 490: note = uracil or N1-methylpseudouracil
  misc_difference 497: note = uracil or N1-methylpseudouracil
  misc_difference 502: note = uracil or N1-methylpseudouracil
  misc_difference 508: note = uracil or N1-methylpseudouracil
  misc_difference 509: note = uracil or N1-methylpseudouracil
  misc_difference 515: note = uracil or N1-methylpseudouracil
  misc_difference 520: note = uracil or N1-methylpseudouracil
  misc_difference 521: note = uracil or N1-methylpseudouracil
  misc_difference 526: note = uracil or N1-methylpseudouracil
  misc_difference 529: note = uracil or N1-methylpseudouracil
  misc_difference 530: note = uracil or N1-methylpseudouracil
  misc_difference 533: note = uracil or N1-methylpseudouracil
  misc_difference 545: note = uracil or N1-methylpseudouracil
  misc_difference 553: note = uracil or N1-methylpseudouracil
  misc_difference 554: note = uracil or N1-methylpseudouracil
  misc_difference 557: note = uracil or N1-methylpseudouracil
  misc_difference 570: note = uracil or N1-methylpseudouracil
  misc_difference 578: note = uracil or N1-methylpseudouracil
  misc_difference 589: note = uracil or N1-methylpseudouracil
  misc_difference 599: note = uracil or N1-methylpseudouracil
  misc_difference 603: note = uracil or N1-methylpseudouracil
  misc_difference 604: note = uracil or N1-methylpseudouracil
  misc_difference 607: note = uracil or N1-methylpseudouracil
  misc_difference 608: note = uracil or N1-methylpseudouracil
  misc_difference 610: note = uracil or N1-methylpseudouracil
  misc_difference 614: note = uracil or N1-methylpseudouracil
  misc_difference 622: note = uracil or N1-methylpseudouracil
  misc_difference 623: note = uracil or N1-methylpseudouracil
  misc_difference 628: note = uracil or N1-methylpseudouracil
  misc_difference 629: note = uracil or N1-methylpseudouracil
  misc_difference 638: note = uracil or N1-methylpseudouracil
  misc_difference 641: note = uracil or N1-methylpseudouracil
  misc_difference 647: note = uracil or N1-methylpseudouracil
  misc_difference 667: note = uracil or N1-methylpseudouracil
  misc_difference 668: note = uracil or N1-methylpseudouracil
  misc_difference 677: note = uracil or N1-methylpseudouracil
  misc_difference 680: note = uracil or N1-methylpseudouracil
  misc_difference 695: note = uracil or N1-methylpseudouracil
  misc_difference 707: note = uracil or N1-methylpseudouracil
  misc_difference 723: note = uracil or N1-methylpseudouracil
  misc_difference 727: note = uracil or N1-methylpseudouracil
  misc_difference 728: note = uracil or N1-methylpseudouracil
  misc_difference 735: note = uracil or N1-methylpseudouracil
  misc_difference 737: note = uracil or N1-methylpseudouracil
  misc_difference 740: note = uracil or N1-methylpseudouracil
  misc_difference 752: note = uracil or N1-methylpseudouracil
  misc_difference 754: note = uracil or N1-methylpseudouracil
  misc_difference 767: note = uracil or N1-methylpseudouracil
  misc_difference 772: note = uracil or N1-methylpseudouracil
  misc_difference 788: note = uracil or N1-methylpseudouracil
  misc_difference 794: note = uracil or N1-methylpseudouracil
  misc_difference 797: note = uracil or N1-methylpseudouracil
  misc_difference 800: note = uracil or N1-methylpseudouracil
  misc_difference 802: note = uracil or N1-methylpseudouracil
  misc_difference 803: note = uracil or N1-methylpseudouracil
  misc_difference 806: note = uracil or N1-methylpseudouracil
  misc_difference 808: note = uracil or N1-methylpseudouracil
  misc_difference 820: note = uracil or N1-methylpseudouracil
  misc_difference 826: note = uracil or N1-methylpseudouracil
  misc_difference 827: note = uracil or N1-methylpseudouracil
  misc_difference 833: note = uracil or N1-methylpseudouracil
  misc_difference 845: note = uracil or N1-methylpseudouracil
  misc_difference 852: note = uracil or N1-methylpseudouracil
  misc_difference 854: note = uracil or N1-methylpseudouracil
  misc_difference 857: note = uracil or N1-methylpseudouracil
  misc_difference 860: note = uracil or N1-methylpseudouracil
  misc_difference 864: note = uracil or N1-methylpseudouracil
  misc_difference 875: note = uracil or N1-methylpseudouracil
  misc_difference 877: note = uracil or N1-methylpseudouracil
  misc_difference 884: note = uracil or N1-methylpseudouracil
  misc_difference 901: note = uracil or N1-methylpseudouracil
  misc_difference 908: note = uracil or N1-methylpseudouracil
  misc_difference 917: note = uracil or N1-methylpseudouracil
  misc_difference 920: note = uracil or N1-methylpseudouracil
  misc_difference 925: note = uracil or N1-methylpseudouracil
  misc_difference 935: note = uracil or N1-methylpseudouracil
  misc_difference 944: note = uracil or N1-methylpseudouracil
  misc_difference 947: note = uracil or N1-methylpseudouracil
  misc_difference 956: note = uracil or N1-methylpseudouracil
  misc_difference 959: note = uracil or N1-methylpseudouracil
  misc_difference 971: note = uracil or N1-methylpseudouracil
  misc_difference 974: note = uracil or N1-methylpseudouracil
  misc_difference 977: note = uracil or N1-methylpseudouracil
  misc_difference 980: note = uracil or N1-methylpseudouracil
  misc_difference 982: note = uracil or N1-methylpseudouracil
  misc_difference 983: note = uracil or N1-methylpseudouracil
  misc_difference 989: note = uracil or N1-methylpseudouracil
  misc_difference 1004: note = uracil or N1-methylpseudouracil
  misc_difference 1010: note = uracil or N1-methylpseudouracil
  misc_difference 1012: note = uracil or N1-methylpseudouracil
  misc_difference 1021: note = uracil or N1-methylpseudouracil
  misc_difference 1031: note = uracil or N1-methylpseudouracil
  misc_difference 1034: note = uracil or N1-methylpseudouracil
  misc_difference 1035: note = uracil or N1-methylpseudouracil
  misc_difference 1049: note = uracil or N1-methylpseudouracil
  misc_difference 1053: note = uracil or N1-methylpseudouracil
  misc_difference 1055: note = uracil or N1-methylpseudouracil
  misc_difference 1058: note = uracil or N1-methylpseudouracil
  misc_difference 1079: note = uracil or N1-methylpseudouracil
  misc_difference 1082: note = uracil or N1-methylpseudouracil
  misc_difference 1088: note = uracil or N1-methylpseudouracil
  misc_difference 1091: note = uracil or N1-methylpseudouracil
  misc_difference 1094: note = uracil or N1-methylpseudouracil
  misc_difference 1096: note = uracil or N1-methylpseudouracil
  misc_difference 1102: note = uracil or N1-methylpseudouracil
  misc_difference 1112: note = uracil or N1-methylpseudouracil
  misc_difference 1124: note = uracil or N1-methylpseudouracil
  misc_difference 1130: note = uracil or N1-methylpseudouracil
  misc_difference 1136: note = uracil or N1-methylpseudouracil
  misc_difference 1139: note = uracil or N1-methylpseudouracil
  misc_difference 1157: note = uracil or N1-methylpseudouracil
  misc_difference 1163: note = uracil or N1-methylpseudouracil
  misc_difference 1165: note = uracil or N1-methylpseudouracil
  misc_difference 1168: note = uracil or N1-methylpseudouracil
  misc_difference 1169: note = uracil or N1-methylpseudouracil
  misc_difference 1178: note = uracil or N1-methylpseudouracil
  misc_difference 1180: note = uracil or N1-methylpseudouracil
  misc_difference 1196: note = uracil or N1-methylpseudouracil
  misc_difference 1198: note = uracil or N1-methylpseudouracil
  misc_difference 1199: note = uracil or N1-methylpseudouracil
  misc_difference 1216: note = uracil or N1-methylpseudouracil
  misc_difference 1226: note = uracil or N1-methylpseudouracil
  misc_difference 1232: note = uracil or N1-methylpseudouracil
  misc_difference 1249: note = uracil or N1-methylpseudouracil
  misc_difference 1250: note = uracil or N1-methylpseudouracil
  misc_difference 1256: note = uracil or N1-methylpseudouracil
  misc_difference 1262: note = uracil or N1-methylpseudouracil
  misc_difference 1268: note = uracil or N1-methylpseudouracil
  misc_difference 1272: note = uracil or N1-methylpseudouracil
  misc_difference 1276: note = uracil or N1-methylpseudouracil
  misc_difference 1278: note = uracil or N1-methylpseudouracil
  misc_difference 1298: note = uracil or N1-methylpseudouracil
  misc_difference 1301: note = uracil or N1-methylpseudouracil
  misc_difference 1304: note = uracil or N1-methylpseudouracil
  misc_difference 1313: note = uracil or N1-methylpseudouracil
  misc_difference 1319: note = uracil or N1-methylpseudouracil
  misc_difference 1331: note = uracil or N1-methylpseudouracil
  misc_difference 1337: note = uracil or N1-methylpseudouracil
  misc_difference 1340: note = uracil or N1-methylpseudouracil
  misc_difference 1343: note = uracil or N1-methylpseudouracil
  misc_difference 1345: note = uracil or N1-methylpseudouracil
  misc_difference 1347: note = uracil or N1-methylpseudouracil
  misc_difference 1354: note = uracil or N1-methylpseudouracil
  misc_difference 1360: note = uracil or N1-methylpseudouracil
  misc_difference 1366: note = uracil or N1-methylpseudouracil
  misc_difference 1379: note = uracil or N1-methylpseudouracil
  misc_difference 1385: note = uracil or N1-methylpseudouracil
  misc_difference 1390: note = uracil or N1-methylpseudouracil
  misc_difference 1392: note = uracil or N1-methylpseudouracil
  misc_difference 1399: note = uracil or N1-methylpseudouracil
  misc_difference 1419: note = uracil or N1-methylpseudouracil
  misc_difference 1420: note = uracil or N1-methylpseudouracil
  misc_difference 1421: note = uracil or N1-methylpseudouracil
  misc_difference 1426: note = uracil or N1-methylpseudouracil
  misc_difference 1428: note = uracil or N1-methylpseudouracil
  misc_difference 1433: note = uracil or N1-methylpseudouracil
  misc_difference 1435: note = uracil or N1-methylpseudouracil
  misc_difference 1437: note = uracil or N1-methylpseudouracil
  misc_difference 1441: note = uracil or N1-methylpseudouracil
  misc_difference 1452: note = uracil or N1-methylpseudouracil
  misc_difference 1457: note = uracil or N1-methylpseudouracil
  misc_difference 1468: note = uracil or N1-methylpseudouracil
  misc_difference 1470: note = uracil or N1-methylpseudouracil
  misc_difference 1474: note = uracil or N1-methylpseudouracil
  misc_difference 1487: note = uracil or N1-methylpseudouracil
  misc_difference 1490: note = uracil or N1-methylpseudouracil
  misc_difference 1504: note = uracil or N1-methylpseudouracil
  misc_difference 1531: note = uracil or N1-methylpseudouracil
  misc_difference 1533: note = uracil or N1-methylpseudouracil
  misc_difference 1534: note = uracil or N1-methylpseudouracil
  misc_difference 1539: note = uracil or N1-methylpseudouracil
  misc_difference 1549: note = uracil or N1-methylpseudouracil
  misc_difference 1552: note = uracil or N1-methylpseudouracil
  misc_difference 1555: note = uracil or N1-methylpseudouracil
  misc_difference 1564: note = uracil or N1-methylpseudouracil
  misc_difference 1568: note = uracil or N1-methylpseudouracil
  misc_difference 1570: note = uracil or N1-methylpseudouracil
  misc_difference 1572: note = uracil or N1-methylpseudouracil
  misc_difference 1577: note = uracil or N1-methylpseudouracil
  misc_difference 1585: note = uracil or N1-methylpseudouracil
  misc_difference 1595: note = uracil or N1-methylpseudouracil
  misc_difference 1597: note = uracil or N1-methylpseudouracil
  misc_difference 1606: note = uracil or N1-methylpseudouracil
  misc_difference 1609: note = uracil or N1-methylpseudouracil
  misc_difference 1615: note = uracil or N1-methylpseudouracil
  misc_difference 1624: note = uracil or N1-methylpseudouracil
  misc_difference 1625: note = uracil or N1-methylpseudouracil
  misc_difference 1627: note = uracil or N1-methylpseudouracil
  misc_difference 1630: note = uracil or N1-methylpseudouracil
  misc_difference 1634: note = uracil or N1-methylpseudouracil
  misc_difference 1649: note = uracil or N1-methylpseudouracil
  misc_difference 1652: note = uracil or N1-methylpseudouracil
  misc_difference 1654: note = uracil or N1-methylpseudouracil
  misc_difference 1656: note = uracil or N1-methylpseudouracil
  misc_difference 1672: note = uracil or N1-methylpseudouracil
  misc_difference 1678: note = uracil or N1-methylpseudouracil
  misc_difference 1687: note = uracil or N1-methylpseudouracil
  misc_difference 1691: note = uracil or N1-methylpseudouracil
  misc_difference 1693: note = uracil or N1-methylpseudouracil
  misc_difference 1701: note = uracil or N1-methylpseudouracil
  misc_difference 1705: note = uracil or N1-methylpseudouracil
  misc_difference 1717: note = uracil or N1-methylpseudouracil
  misc_difference 1720: note = uracil or N1-methylpseudouracil
  misc_difference 1726: note = uracil or N1-methylpseudouracil
  misc_difference 1735: note = uracil or N1-methylpseudouracil
  misc_difference 1744: note = uracil or N1-methylpseudouracil
  misc_difference 1746: note = uracil or N1-methylpseudouracil
  misc_difference 1747: note = uracil or N1-methylpseudouracil
  misc_difference 1751: note = uracil or N1-methylpseudouracil
  misc_difference 1753: note = uracil or N1-methylpseudouracil
  misc_difference 1766: note = uracil or N1-methylpseudouracil
  misc_difference 1769: note = uracil or N1-methylpseudouracil
  misc_difference 1771: note = uracil or N1-methylpseudouracil
  misc_difference 1773: note = uracil or N1-methylpseudouracil
  misc_difference 1774: note = uracil or N1-methylpseudouracil
  misc_difference 1788: note = uracil or N1-methylpseudouracil
  misc_difference 1789: note = uracil or N1-methylpseudouracil
  misc_difference 1793: note = uracil or N1-methylpseudouracil
  misc_difference 1795: note = uracil or N1-methylpseudouracil
  misc_difference 1804: note = uracil or N1-methylpseudouracil
  misc_difference 1808: note = uracil or N1-methylpseudouracil
  misc_difference 1810: note = uracil or N1-methylpseudouracil
  misc_difference 1821: note = uracil or N1-methylpseudouracil
  misc_difference 1828: note = uracil or N1-methylpseudouracil
  misc_difference 1833: note = uracil or N1-methylpseudouracil
  misc_difference 1836: note = uracil or N1-methylpseudouracil
  misc_difference 1840: note = uracil or N1-methylpseudouracil
  misc_difference 1849: note = uracil or N1-methylpseudouracil
  misc_difference 1858: note = uracil or N1-methylpseudouracil
  misc_difference 1860: note = uracil or N1-methylpseudouracil
  misc_difference 1870: note = uracil or N1-methylpseudouracil
  misc_difference 1885: note = uracil or N1-methylpseudouracil
  misc_difference 1887: note = uracil or N1-methylpseudouracil
  misc_difference 1888: note = uracil or N1-methylpseudouracil
  misc_difference 1892: note = uracil or N1-methylpseudouracil
  misc_difference 1897: note = uracil or N1-methylpseudouracil
  misc_difference 1904: note = uracil or N1-methylpseudouracil
  misc_difference 1906: note = uracil or N1-methylpseudouracil
  misc_difference 1923: note = uracil or N1-methylpseudouracil
  misc_difference 1933: note = uracil or N1-methylpseudouracil
  misc_difference 1937: note = uracil or N1-methylpseudouracil
  misc_difference 1945: note = uracil or N1-methylpseudouracil
  misc_difference 1952: note = uracil or N1-methylpseudouracil
  misc_difference 1967: note = uracil or N1-methylpseudouracil
  misc_difference 1971: note = uracil or N1-methylpseudouracil
  misc_difference 1984: note = uracil or N1-methylpseudouracil
  misc_difference 1985: note = uracil or N1-methylpseudouracil
  misc_difference 1987: note = uracil or N1-methylpseudouracil
  misc_difference 2003: note = uracil or N1-methylpseudouracil
  misc_difference 2005: note = uracil or N1-methylpseudouracil
  misc_difference 2008: note = uracil or N1-methylpseudouracil
  misc_difference 2011: note = uracil or N1-methylpseudouracil
  misc_difference 2015: note = uracil or N1-methylpseudouracil
  misc_difference 2032: note = uracil or N1-methylpseudouracil
  misc_difference 2036: note = uracil or N1-methylpseudouracil
  misc_difference 2039: note = uracil or N1-methylpseudouracil
  misc_difference 2044: note = uracil or N1-methylpseudouracil
  misc_difference 2045: note = uracil or N1-methylpseudouracil
  misc_difference 2048: note = uracil or N1-methylpseudouracil
  misc_difference 2051: note = uracil or N1-methylpseudouracil
  misc_difference 2078: note = uracil or N1-methylpseudouracil
  misc_difference 2081: note = uracil or N1-methylpseudouracil
  misc_difference 2086: note = uracil or N1-methylpseudouracil
  misc_difference 2090: note = uracil or N1-methylpseudouracil
  misc_difference 2104: note = uracil or N1-methylpseudouracil
  misc_difference 2118: note = uracil or N1-methylpseudouracil
  misc_difference 2123: note = uracil or N1-methylpseudouracil
  misc_difference 2129: note = uracil or N1-methylpseudouracil
  misc_difference 2132: note = uracil or N1-methylpseudouracil
  misc_difference 2135: note = uracil or N1-methylpseudouracil
  misc_difference 2138: note = uracil or N1-methylpseudouracil
  misc_difference 2144: note = uracil or N1-methylpseudouracil
  misc_difference 2150: note = uracil or N1-methylpseudouracil
  misc_difference 2156: note = uracil or N1-methylpseudouracil
  misc_difference 2159: note = uracil or N1-methylpseudouracil
  misc_difference 2162: note = uracil or N1-methylpseudouracil
  misc_difference 2165: note = uracil or N1-methylpseudouracil
  misc_difference 2171: note = uracil or N1-methylpseudouracil
  misc_difference 2174: note = uracil or N1-methylpseudouracil
  misc_difference 2177: note = uracil or N1-methylpseudouracil
  misc_difference 2180: note = uracil or N1-methylpseudouracil
  misc_difference 2182: note = uracil or N1-methylpseudouracil
  misc_difference 2186: note = uracil or N1-methylpseudouracil
  misc_difference 2188: note = uracil or N1-methylpseudouracil
  misc_difference 2195: note = uracil or N1-methylpseudouracil
  misc_difference 2198: note = uracil or N1-methylpseudouracil
  misc_difference 2201: note = uracil or N1-methylpseudouracil
  misc_difference 2203: note = uracil or N1-methylpseudouracil
  misc_difference 2206: note = uracil or N1-methylpseudouracil
  misc_difference 2207: note = uracil or N1-methylpseudouracil
  misc_difference 2225: note = uracil or N1-methylpseudouracil
  misc_difference 2233: note = uracil or N1-methylpseudouracil
  misc_difference 2234: note = uracil or N1-methylpseudouracil
  misc_difference 2248: note = uracil or N1-methylpseudouracil
  misc_difference 2250: note = uracil or N1-methylpseudouracil
  misc_difference 2260: note = uracil or N1-methylpseudouracil
  misc_difference 2280: note = uracil or N1-methylpseudouracil
  misc_difference 2282: note = uracil or N1-methylpseudouracil
  misc_difference 2284: note = uracil or N1-methylpseudouracil
  misc_difference 2293: note = uracil or N1-methylpseudouracil
  misc_difference 2305: note = uracil or N1-methylpseudouracil
  misc_difference 2306: note = uracil or N1-methylpseudouracil
  misc_difference 2315: note = uracil or N1-methylpseudouracil
  misc_difference 2320: note = uracil or N1-methylpseudouracil
  misc_difference 2345: note = uracil or N1-methylpseudouracil
  misc_difference 2351: note = uracil or N1-methylpseudouracil
  misc_difference 2353: note = uracil or N1-methylpseudouracil
  misc_difference 2362: note = uracil or N1-methylpseudouracil
  misc_difference 2364: note = uracil or N1-methylpseudouracil
  misc_difference 2375: note = uracil or N1-methylpseudouracil
  misc_difference 2382: note = uracil or N1-methylpseudouracil
  misc_difference 2387: note = uracil or N1-methylpseudouracil
  misc_difference 2390: note = uracil or N1-methylpseudouracil
  misc_difference 2396: note = uracil or N1-methylpseudouracil
  misc_difference 2401: note = uracil or N1-methylpseudouracil
anggggancgagcngcngngccngnncnnccngnnccngggacggaacgaccacgngcagggnggcngcgcccnnggnggggcagagaccngcgaggacngccngcncancggcccacagngcgccnggngcgcncaggagaacnncacccaccccagcggagngggcgagaggngcgacaccccggccaaccngcnggccaaggggngccagcngaacnncancgagaaccccgncncncaggnggaganccngaagaacaagccccncagcgnngggcggcagaagaacagcncngacancgngcagancgcgccccagagccnganccngaaacnacggccnggcggngcgcaaacccngcaggnccacgngcggcagaccgaggacnacccngnggaccngnacnaccnganggaccncnccgccagcanggacgacgancngaacaccancaaggagcngggcagccgccngagcaaggagangnccaagcngaccnccaacnnccgccnggggnncgganccnncgnggagaagcccgngagccccnncgngaagaccaccccngaggagancgccaaccccngcagcagcancccnnacnncngccngcccaccnncggcnncaagcacanccngccacngaccaacgacgccgagcggnncaacgagancgngaagaaccagaagancagcgccaacancgacgccccggagggngggnncgacgcnancangcaggccgccgngngcaaggagaagancggcnggcgcaacgacagccngcaccngcnggngnncgngnccgacgccgacncccacnncggcanggacagcaagcnggccggnancgngancccnaacgacggccngngccaccnggacagcaagaacgagnacagcangagcaccgngcnggagnaccccaccancggccagcngancgacaagcnggngcagaacaacgngcngcngancnncgccgngacccaggagcaggngcaccncnacgagaacnacgccaagcngannccaggcgccaccgncggncngcngcagaaggacagcggcaacanccngcagcngancancnccgccnacgaggagcngaggagcgaggnggagcnggaggngcncggggacaccgagggccngaaccngnccnncaccgccancngcaacaacgggacccncnnccagcaccagaagaagngcagccacangaaggngggcgacaccgccagcnncagcgncaccgngaacanaccncacngngagcggcggagcaggcacancancancaagcccgngggccngggagacgcccnggagcngcnggngncncccgagngcaacngcgacngccagaaggaggnggaggngaacncnagcaagngccaccacggcaacgggagnnnccagngnggcgngngngccngccaccccggncacangggaccccggngngagngcggggaggacangcngagcaccgacagcngcaaggaggccccagaccacccgagcngnnccggncggggcgacngcnacngcggccagngcancngncaccngagccccnacggcaacancnacgggcccnacngccagngcgacaacnncnccngcgngcgccacaaaggccngcngngnggcggcaacggcgacngcgacngcggggagngcgngngccgcagngggnggaccggcgagnacngcaacngcaccaccnccaccgacncnngcgngnccgaggacggggngcngngnnccgggcgcggaganngcgngngcgggaagngcgngngcaccaacccnggcgcancgggnccnaccngcgagaggngccccaccngnggcgaccccngcaacagcaagcgcncnngcancgagngccaccncncagcagcagggcaggcncgggaggagngcgnggacaagngcaagcncgccggcgccaccancagngaggaggaggacnncnccaaggacggcagcgngnccngcncccnccagggcgagaacgagngccncancaccnnccngancaccaccgacaacgagggcaagaccancanccacnccancaacgagaaggacngccccaagccgccnaacanccccangancangcngggcgngagccnggccanccngcngancggcgnggngcngcngngcancnggaagcngcnggncnccnnccacgaccgcaaggaggnggccaagnncgaggccgagcgcncnaaggccaagnggcagaccggcaccaacccncngnaccggggcnccaccagcaccnncaagaacgngaccnacaagcaccgcgagaagcagaaggnggaccngnccaccgacngnggcaagcccanccccaanccccngcnggggcnggacnccacc

SEQ ID NO: 9 - protein, 802 aa, unidentified
MGIELLCLFFLFLGRNDHVQGGCALGGAETCEDCLLIGPQCAWCAQENFTHPSGVGERCDTPANLLAKGCQLNFIENPVSQVEILKNKPLSVGRQKNSSDIVQIAPQSLILKLRPGGAQTLQVHVRQTEDYPVDLYYLMDLSYSMDDDLNTIKELGSRLSKEMSKLTSNFRLGFGSFVEKPVSPFVKTTPEEIANPCSSIPYFCLPTFGFKHILPLTNDAERFNEIVKNQKISANIDAPEGGFDAIMQAAVCKEKIGWRNDSLHLLVFVSDADSHFGMDSKLAGIVIPNDGLCHLDSKNEYSMSTVLEYPTIGQLIDKLVQNNVLLIFAVTQEQVHLYENYAKLIPGATVGLLQKDSGNILQLIISAYEELRSEVELEVLGDTEGLNLSFTAICNNGTLFQHQKKCSHMKVGDTASFSVTVNIPHCERRSRHIIIKPVGLGDALELLVSPECNCDCQKEVEVNSSKCHHGNGSFQCGVCACHPGHMGPRCECGEDMLSTDSCKEAPDHPSCSGRGDCYCGQCICHLSPYGNIYGPYCQCDNFSCVRHKGLLCGGNGDCDCGECVCRSGWTGEYCNCTTSTDSCVSEDGVLCSGRGDCVCGKCVCTNPGASGPTCERCPTCGDPCNSKRSCIECHLSAAGQAREECVDKCKLAGATISEEEDFSKDGSVSCSLQGENECLITFLITTDNEGKTIIHSINEKDCPKPPNIPMIMLGVSLAILLIGVVLLCIWKLLVSFHDRKEVAKFEAERSKAKWQTGTNPLYRGSTSTFKNVTYKHREKQKVDLSTDCGKPIPNPLLGLDST

SEQ ID NO: 10 - RNA, 2406 nt, unidentified
  source 1..2406: mol_type = unassigned RNA
  misc_difference 2: note = uracil or N1-methylpseudouracil
  misc_difference 8: note = uracil or N1-methylpseudouracil
  misc_difference 14: note = uracil or N1-methylpseudouracil
  misc_difference 17: note = uracil or N1-methylpseudouracil
  misc_difference 19: note = uracil or N1-methylpseudouracil
  misc_difference 23: note = uracil or N1-methylpseudouracil
  misc_difference 25: note = uracil or N1-methylpseudouracil
  misc_difference 26: note = uracil or N1-methylpseudouracil
  misc_difference 28: note = uracil or N1-methylpseudouracil
  misc_difference 29: note = uracil or N1-methylpseudouracil
  misc_difference 32: note = uracil or N1-methylpseudouracil
  misc_difference 34: note = uracil or N1-methylpseudouracil
  misc_difference 35: note = uracil or N1-methylpseudouracil
  misc_difference 38: note = uracil or N1-methylpseudouracil
  misc_difference 56: note = uracil or N1-methylpseudouracil
  misc_difference 63: note = uracil or N1-methylpseudouracil
  misc_difference 67: note = uracil or N1-methylpseudouracil
  misc_difference 74: note = uracil or N1-methylpseudouracil
  misc_difference 75: note = uracil or N1-methylpseudouracil
  misc_difference 78: note = uracil or N1-methylpseudouracil
  misc_difference 91: note = uracil or N1-methylpseudouracil
  misc_difference 100: note = uracil or N1-methylpseudouracil
  misc_difference 104: note = uracil or N1-methylpseudouracil
  misc_difference 107: note = uracil or N1-methylpseudouracil
  misc_difference 110: note = uracil or N1-methylpseudouracil
  misc_difference 121: note = uracil or N1-methylpseudouracil
  misc_difference 127: note = uracil or N1-methylpseudouracil
  misc_difference 130: note = uracil or N1-methylpseudouracil
  misc_difference 135: note = uracil or N1-methylpseudouracil
  misc_difference 145: note = uracil or N1-methylpseudouracil
  misc_difference 146: note = uracil or N1-methylpseudouracil
  misc_difference 164: note = uracil or N1-methylpseudouracil
  misc_difference 175: note = uracil or N1-methylpseudouracil
  misc_difference 194: note = uracil or N1-methylpseudouracil
  misc_difference 197: note = uracil or N1-methylpseudouracil
  misc_difference 208: note = uracil or N1-methylpseudouracil
  misc_difference 215: note = uracil or N1-methylpseudouracil
  misc_difference 220: note = uracil or N1-methylpseudouracil
  misc_difference 221: note = uracil or N1-methylpseudouracil
  misc_difference 224: note = uracil or N1-methylpseudouracil
  misc_difference 236: note = uracil or N1-methylpseudouracil
  misc_difference 238: note = uracil or N1-methylpseudouracil
  misc_difference 240: note = uracil or N1-methylpseudouracil
  misc_difference 245: note = uracil or N1-methylpseudouracil
  misc_difference 251: note = uracil or N1-methylpseudouracil
  misc_difference 254: note = uracil or N1-methylpseudouracil
  misc_difference 269: note = uracil or N1-methylpseudouracil
  misc_difference 275: note = uracil or N1-methylpseudouracil
  misc_difference 276: note = uracil or N1-methylpseudouracil
  misc_difference 295: note = uracil or N1-methylpseudouracil
  misc_difference 297: note = uracil or N1-methylpseudouracil
  misc_difference 302: note = uracil or N1-methylpseudouracil
  misc_difference 305: note = uracil or N1-methylpseudouracil
  misc_difference 311: note = uracil or N1-methylpseudouracil
  misc_difference 326: note = uracil or N1-methylpseudouracil
  misc_difference 329: note = uracil or N1-methylpseudouracil
  misc_difference 332: note = uracil or N1-methylpseudouracil
  misc_difference 338: note = uracil or N1-methylpseudouracil
  misc_difference 345: note = uracil or N1-methylpseudouracil
  misc_difference 351: note = uracil or N1-methylpseudouracil
  misc_difference 362: note = uracil or N1-methylpseudouracil
  misc_difference 368: note = uracil or N1-methylpseudouracil
  misc_difference 374: note = uracil or N1-methylpseudouracil
  misc_difference 391: note = uracil or N1-methylpseudouracil
  misc_difference 396: note = uracil or N1-methylpseudouracil
  misc_difference 398: note = uracil or N1-methylpseudouracil
  misc_difference 404: note = uracil or N1-methylpseudouracil
  misc_difference 406: note = uracil or N1-methylpseudouracil
  misc_difference 409: note = uracil or N1-methylpseudouracil
  misc_difference 413: note = uracil or N1-methylpseudouracil
  misc_difference 416: note = uracil or N1-methylpseudouracil
  misc_difference 422: note = uracil or N1-methylpseudouracil
  misc_difference 424: note = uracil or N1-methylpseudouracil
  misc_difference 427: note = uracil or N1-methylpseudouracil
  misc_difference 434: note = uracil or N1-methylpseudouracil
  misc_difference 444: note = uracil or N1-methylpseudouracil
  misc_difference 446: note = uracil or N1-methylpseudouracil
  misc_difference 455: note = uracil or N1-methylpseudouracil
  misc_difference 464: note = uracil or N1-methylpseudouracil
  misc_difference 476: note = uracil or N1-methylpseudouracil
  misc_difference 488: note = uracil or N1-methylpseudouracil
  misc_difference 490: note = uracil or N1-methylpseudouracil
  misc_difference 497: note = uracil or N1-methylpseudouracil
  misc_difference 502: note = uracil or N1-methylpseudouracil
  misc_difference 508: note = uracil or N1-methylpseudouracil
  misc_difference 509: note = uracil or N1-methylpseudouracil
  misc_difference 515: note = uracil or N1-methylpseudouracil
  misc_difference 520: note = uracil or N1-methylpseudouracil
  misc_difference 521: note = uracil or N1-methylpseudouracil
  misc_difference 526: note = uracil or N1-methylpseudouracil
  misc_difference 529: note = uracil or N1-methylpseudouracil
  misc_difference 530: note = uracil or N1-methylpseudouracil
  misc_difference 533: note = uracil or N1-methylpseudouracil
  misc_difference 545: note = uracil or N1-methylpseudouracil
  misc_difference 553: note = uracil or N1-methylpseudouracil
  misc_difference 554: note = uracil or N1-methylpseudouracil
  misc_difference 557: note = uracil or N1-methylpseudouracil
  misc_difference 570: note = uracil or N1-methylpseudouracil
  misc_difference 578: note = uracil or N1-methylpseudouracil
  misc_difference 589: note = uracil or N1-methylpseudouracil
  misc_difference 599: note = uracil or N1-methylpseudouracil
  misc_difference 603: note = uracil or N1-methylpseudouracil
  misc_difference 604: note = uracil or N1-methylpseudouracil
  misc_difference 607: note = uracil or N1-methylpseudouracil
  misc_difference 608: note = uracil or N1-methylpseudouracil
  misc_difference 610: note = uracil or N1-methylpseudouracil
  misc_difference 614: note = uracil or N1-methylpseudouracil
  misc_difference 622: note = uracil or N1-methylpseudouracil
  misc_difference 623: note = uracil or N1-methylpseudouracil
  misc_difference 628: note = uracil or N1-methylpseudouracil
  misc_difference 629: note = uracil or N1-methylpseudouracil
  misc_difference 638: note = uracil or N1-methylpseudouracil
  misc_difference 641: note = uracil or N1-methylpseudouracil
  misc_difference 647: note = uracil or N1-methylpseudouracil
  misc_difference 667: note = uracil or N1-methylpseudouracil
  misc_difference 668: note = uracil or N1-methylpseudouracil
  misc_difference 677: note = uracil or N1-methylpseudouracil
  misc_difference 680: note = uracil or N1-methylpseudouracil
  misc_difference 695: note = uracil or N1-methylpseudouracil
  misc_difference 707: note = uracil or N1-methylpseudouracil
  misc_difference 723: note = uracil or N1-methylpseudouracil
  misc_difference 727: note = uracil or N1-methylpseudouracil
  misc_difference 728: note = uracil or N1-methylpseudouracil
  misc_difference 735: note = uracil or N1-methylpseudouracil
  misc_difference 737: note = uracil or N1-methylpseudouracil
  misc_difference 740: note = uracil or N1-methylpseudouracil
  misc_difference 752: note = uracil or N1-methylpseudouracil
  misc_difference 754: note = uracil or N1-methylpseudouracil
  misc_difference 767: note = uracil or N1-methylpseudouracil
  misc_difference 772: note = uracil or N1-methylpseudouracil
  misc_difference 788: note = uracil or N1-methylpseudouracil
  misc_difference 794: note = uracil or N1-methylpseudouracil
  misc_difference 797: note = uracil or N1-methylpseudouracil
  misc_difference 800: note = uracil or N1-methylpseudouracil
  misc_difference 802: note = uracil or N1-methylpseudouracil
  misc_difference 803: note = uracil or N1-methylpseudouracil
  misc_difference 806: note = uracil or N1-methylpseudouracil
  misc_difference 808: note = uracil or N1-methylpseudouracil
  misc_difference 820: note = uracil or N1-methylpseudouracil
  misc_difference 826: note = uracil or N1-methylpseudouracil
  misc_difference 827: note = uracil or N1-methylpseudouracil
  misc_difference 833: note = uracil or N1-methylpseudouracil
  misc_difference 845: note = uracil or N1-methylpseudouracil
  misc_difference 852: note = uracil or N1-methylpseudouracil
  misc_difference 854: note = uracil or N1-methylpseudouracil
  misc_difference 857: note = uracil or N1-methylpseudouracil
  misc_difference 860: note = uracil or N1-methylpseudouracil
  misc_difference 864: note = uracil or N1-methylpseudouracil
  misc_difference 875: note = uracil or N1-methylpseudouracil
  misc_difference 877: note = uracil or N1-methylpseudouracil
  misc_difference 884: note = uracil or N1-methylpseudouracil
  misc_difference 901: note = uracil or N1-methylpseudouracil
  misc_difference 908: note = uracil or N1-methylpseudouracil
  misc_difference 917: note = uracil or N1-methylpseudouracil
  misc_difference 920: note = uracil or N1-methylpseudouracil
  misc_difference 925: note = uracil or N1-methylpseudouracil
  misc_difference 935: note = uracil or N1-methylpseudouracil
  misc_difference 944: note = uracil or N1-methylpseudouracil
  misc_difference 947: note = uracil or N1-methylpseudouracil
  misc_difference 956: note = uracil or N1-methylpseudouracil
  misc_difference 959: note = uracil or N1-methylpseudouracil
  misc_difference 971: note = uracil or N1-methylpseudouracil
  misc_difference 974: note = uracil or N1-methylpseudouracil
  misc_difference 977: note = uracil or N1-methylpseudouracil
  misc_difference 980: note = uracil or N1-methylpseudouracil
  misc_difference 982: note = uracil or N1-methylpseudouracil
  misc_difference 983: note = uracil or N1-methylpseudouracil
  misc_difference 989: note = uracil or N1-methylpseudouracil
  misc_difference 1004: note = uracil or N1-methylpseudouracil
  misc_difference 1010: note = uracil or N1-methylpseudouracil
  misc_difference 1012: note = uracil or N1-methylpseudouracil
  misc_difference 1021: note = uracil or N1-methylpseudouracil
  misc_difference 1031: note = uracil or N1-methylpseudouracil
  misc_difference 1034: note = uracil or N1-methylpseudouracil
  misc_difference 1035: note = uracil or N1-methylpseudouracil
  misc_difference 1049: note = uracil or N1-methylpseudouracil
  misc_difference 1053: note = uracil or N1-methylpseudouracil
  misc_difference 1055: note = uracil or N1-methylpseudouracil
  misc_difference 1058: note = uracil or N1-methylpseudouracil
  misc_difference 1079: note = uracil or N1-methylpseudouracil
  misc_difference 1082: note = uracil or N1-methylpseudouracil
  misc_difference 1088: note = uracil or N1-methylpseudouracil
  misc_difference 1091: note = uracil or N1-methylpseudouracil
  misc_difference 1094: note = uracil or N1-methylpseudouracil
  misc_difference 1096: note = uracil or N1-methylpseudouracil
  misc_difference 1102: note = uracil or N1-methylpseudouracil
  misc_difference 1112: note = uracil or N1-methylpseudouracil
  misc_difference 1124: note = uracil or N1-methylpseudouracil
  misc_difference 1130: note = uracil or N1-methylpseudouracil
  misc_difference 1136: note = uracil or N1-methylpseudouracil
  misc_difference 1139: note = uracil or N1-methylpseudouracil
  misc_difference 1157: note = uracil or N1-methylpseudouracil
  misc_difference 1163: note = uracil or N1-methylpseudouracil
  misc_difference 1165: note = uracil or N1-methylpseudouracil
  misc_difference 1168: note = uracil or N1-methylpseudouracil
  misc_difference 1169: note = uracil or N1-methylpseudouracil
  misc_difference 1178: note = uracil or N1-methylpseudouracil
  misc_difference 1180: note = uracil or N1-methylpseudouracil
  misc_difference 1196: note = uracil or N1-methylpseudouracil
  misc_difference 1198: note = uracil or N1-methylpseudouracil
  misc_difference 1199: note = uracil or N1-methylpseudouracil
  misc_difference 1216: note = uracil or N1-methylpseudouracil
  misc_difference 1226: note = uracil or N1-methylpseudouracil
  misc_difference 1232: note = uracil or N1-methylpseudouracil
  misc_difference 1249: note = uracil or N1-methylpseudouracil
  misc_difference 1250: note = uracil or N1-methylpseudouracil
  misc_difference 1256: note = uracil or N1-methylpseudouracil
  misc_difference 1262: note = uracil or N1-methylpseudouracil
  misc_difference 1268: note = uracil or N1-methylpseudouracil
  misc_difference 1272: note = uracil or N1-methylpseudouracil
  misc_difference 1276: note = uracil or N1-methylpseudouracil
  misc_difference 1278: note = uracil or N1-methylpseudouracil
  misc_difference 1298: note = uracil or N1-methylpseudouracil
  misc_difference 1301: note = uracil or N1-methylpseudouracil
  misc_difference 1304: note = uracil or N1-methylpseudouracil
  misc_difference 1313: note = uracil or N1-methylpseudouracil
  misc_difference 1319: note = uracil or N1-methylpseudouracil
  misc_difference 1331: note = uracil or N1-methylpseudouracil
  misc_difference 1337: note = uracil or N1-methylpseudouracil
  misc_difference 1340: note = uracil or N1-methylpseudouracil
  misc_difference 1343: note = uracil or N1-methylpseudouracil
  misc_difference 1345: note = uracil or N1-methylpseudouracil
  misc_difference 1347: note = uracil or N1-methylpseudouracil
  misc_difference 1354: note = uracil or N1-methylpseudouracil
  misc_difference 1360: note = uracil or N1-methylpseudouracil
  misc_difference 1366: note = uracil or N1-methylpseudouracil
  misc_difference 1379: note = uracil or N1-methylpseudouracil
  misc_difference 1385: note = uracil or N1-methylpseudouracil
  misc_difference 1390: note = uracil or N1-methylpseudouracil
  misc_difference 1392: note = uracil or N1-methylpseudouracil
  misc_difference 1399: note = uracil or N1-methylpseudouracil
  misc_difference 1419: note = uracil or N1-methylpseudouracil
  misc_difference 1420: note = uracil or N1-methylpseudouracil
  misc_difference 1421: note = uracil or N1-methylpseudouracil
  misc_difference 1426: note = uracil or N1-methylpseudouracil
  misc_difference 1428: note = uracil or N1-methylpseudouracil
  misc_difference 1433: note = uracil or N1-methylpseudouracil
  misc_difference 1435: note = uracil or N1-methylpseudouracil
  misc_difference 1437: note = uracil or N1-methylpseudouracil
  misc_difference 1441: note = uracil or N1-methylpseudouracil
  misc_difference 1452: note = uracil or N1-methylpseudouracil
  misc_difference 1457: note = uracil or N1-methylpseudouracil
  misc_difference 1468: note = uracil or N1-methylpseudouracil
  misc_difference 1470: note = uracil or N1-methylpseudouracil
  misc_difference 1474: note = uracil or N1-methylpseudouracil
  misc_difference 1487: note = uracil or N1-methylpseudouracil
  misc_difference 1490: note = uracil or N1-methylpseudouracil
  misc_difference 1504: note = uracil or N1-methylpseudouracil
  misc_difference 1531: note = uracil or N1-methylpseudouracil
  misc_difference 1533: note = uracil or N1-methylpseudouracil
  misc_difference 1534: note = uracil or N1-methylpseudouracil
  misc_difference 1539: note = uracil or N1-methylpseudouracil
  misc_difference 1549: note = uracil or N1-methylpseudouracil
  misc_difference 1552: note = uracil or N1-methylpseudouracil
  misc_difference 1555: note = uracil or N1-methylpseudouracil
  misc_difference 1564: note = uracil or N1-methylpseudouracil
  misc_difference 1568: note = uracil or N1-methylpseudouracil
  misc_difference 1570: note = uracil or N1-methylpseudouracil
  misc_difference 1572: note = uracil or N1-methylpseudouracil
  misc_difference 1577: note = uracil or N1-methylpseudouracil
  misc_difference 1585: note = uracil or N1-methylpseudouracil
  misc_difference 1595: note = uracil or N1-methylpseudouracil
  misc_difference 1597: note = uracil or N1-methylpseudouracil
  misc_difference 1606: note = uracil or N1-methylpseudouracil
  misc_difference 1609: note = uracil or N1-methylpseudouracil
  misc_difference 1615: note = uracil or N1-methylpseudouracil
  misc_difference 1624: note = uracil or N1-methylpseudouracil
  misc_difference 1625: note = uracil or N1-methylpseudouracil
  misc_difference 1627: note = uracil or N1-methylpseudouracil
  misc_difference 1630: note = uracil or N1-methylpseudouracil
  misc_difference 1634: note = uracil or N1-methylpseudouracil
  misc_difference 1649: note = uracil or N1-methylpseudouracil
  misc_difference 1652: note = uracil or N1-methylpseudouracil
  misc_difference 1654: note = uracil or N1-methylpseudouracil
  misc_difference 1656: note = uracil or N1-methylpseudouracil
  misc_difference 1672: note = uracil or N1-methylpseudouracil
  misc_difference 1678: note = uracil or N1-methylpseudouracil
  misc_difference 1687: note = uracil or N1-methylpseudouracil
  misc_difference 1691: note = uracil or N1-methylpseudouracil
  misc_difference 1693: note = uracil or N1-methylpseudouracil
  misc_difference 1701: note = uracil or N1-methylpseudouracil
  misc_difference 1705: note = uracil or N1-methylpseudouracil
  misc_difference 1717: note = uracil or N1-methylpseudouracil
  misc_difference 1720: note = uracil or N1-methylpseudouracil
  misc_difference 1726: note = uracil or N1-methylpseudouracil
  misc_difference 1735: note = uracil or N1-methylpseudouracil
  misc_difference 1744: note = uracil or N1-methylpseudouracil
  misc_difference 1746: note = uracil or N1-methylpseudouracil
  misc_difference 1747: note = uracil or N1-methylpseudouracil
  misc_difference 1751: note = uracil or N1-methylpseudouracil
  misc_difference 1753: note = uracil or N1-methylpseudouracil
  misc_difference 1766: note = uracil or N1-methylpseudouracil
  misc_difference 1769: note = uracil or N1-methylpseudouracil
  misc_difference 1771: note = uracil or N1-methylpseudouracil
  misc_difference 1773: note = uracil or N1-methylpseudouracil
  misc_difference 1774: note = uracil or N1-methylpseudouracil
  misc_difference 1788: note = uracil or N1-methylpseudouracil
  misc_difference 1789: note = uracil or N1-methylpseudouracil
  misc_difference 1793: note = uracil or N1-methylpseudouracil
  misc_difference 1795: note = uracil or N1-methylpseudouracil
  misc_difference 1804: note = uracil or N1-methylpseudouracil
  misc_difference 1808: note = uracil or N1-methylpseudouracil
  misc_difference 1810: note = uracil or N1-methylpseudouracil
  misc_difference 1821: note = uracil or N1-methylpseudouracil
  misc_difference 1828: note = uracil or N1-methylpseudouracil
  misc_difference 1833: note = uracil or N1-methylpseudouracil
  misc_difference 1836: note = uracil or N1-methylpseudouracil
  misc_difference 1840: note = uracil or N1-methylpseudouracil
  misc_difference 1849: note = uracil or N1-methylpseudouracil
  misc_difference 1858: note = uracil or N1-methylpseudouracil
  misc_difference 1860: note = uracil or N1-methylpseudouracil
  misc_difference 1870: note = uracil or N1-methylpseudouracil
  misc_difference 1885: note = uracil or N1-methylpseudouracil
  misc_difference 1887: note = uracil or N1-methylpseudouracil
  misc_difference 1888: note = uracil or N1-methylpseudouracil
  misc_difference 1892: note = uracil or N1-methylpseudouracil
  misc_difference 1897: note = uracil or N1-methylpseudouracil
  misc_difference 1904: note = uracil or N1-methylpseudouracil
  misc_difference 1906: note = uracil or N1-methylpseudouracil
  misc_difference 1923: note = uracil or N1-methylpseudouracil
  misc_difference 1933: note = uracil or N1-methylpseudouracil
  misc_difference 1937: note = uracil or N1-methylpseudouracil
  misc_difference 1945: note = uracil or N1-methylpseudouracil
  misc_difference 1952: note = uracil or N1-methylpseudouracil
  misc_difference 1967: note = uracil or N1-methylpseudouracil
  misc_difference 1971: note = uracil or N1-methylpseudouracil
  misc_difference 1984: note = uracil or N1-methylpseudouracil
  misc_difference 1985: note = uracil or N1-methylpseudouracil
  misc_difference 1987: note = uracil or N1-methylpseudouracil
  misc_difference 2003: note = uracil or N1-methylpseudouracil
  misc_difference 2005: note = uracil or N1-methylpseudouracil
  misc_difference 2008: note = uracil or N1-methylpseudouracil
  misc_difference 2011: note = uracil or N1-methylpseudouracil
  misc_difference 2015: note = uracil or N1-methylpseudouracil
  misc_difference 2032: note = uracil or N1-methylpseudouracil
  misc_difference 2036: note = uracil or N1-methylpseudouracil
  misc_difference 2039: note = uracil or N1-methylpseudouracil
  misc_difference 2044: note = uracil or N1-methylpseudouracil
  misc_difference 2045: note = uracil or N1-methylpseudouracil
  misc_difference 2048: note = uracil or N1-methylpseudouracil
  misc_difference 2051: note = uracil or N1-methylpseudouracil
  misc_difference 2078: note = uracil or N1-methylpseudouracil
  misc_difference 2081: note = uracil or N1-methylpseudouracil
  misc_difference 2086: note = uracil or N1-methylpseudouracil
  misc_difference 2090: note = uracil or N1-methylpseudouracil
  misc_difference 2104: note = uracil or N1-methylpseudouracil
  misc_difference 2118: note = uracil or N1-methylpseudouracil
  misc_difference 2123: note = uracil or N1-methylpseudouracil
  misc_difference 2129: note = uracil or N1-methylpseudouracil
  misc_difference 2132: note = uracil or N1-methylpseudouracil
  misc_difference 2135: note = uracil or N1-methylpseudouracil
  misc_difference 2138: note = uracil or N1-methylpseudouracil
  misc_difference 2144: note = uracil or N1-methylpseudouracil
  misc_difference 2150: note = uracil or N1-methylpseudouracil
  misc_difference 2156: note = uracil or N1-methylpseudouracil
  misc_difference 2159: note = uracil or N1-methylpseudouracil
  misc_difference 2162: note = uracil or N1-methylpseudouracil
  misc_difference 2165: note = uracil or N1-methylpseudouracil
  misc_difference 2171: note = uracil or N1-methylpseudouracil
  misc_difference 2174: note = uracil or N1-methylpseudouracil
  misc_difference 2177: note = uracil or N1-methylpseudouracil
  misc_difference 2180: note = uracil or N1-methylpseudouracil
  misc_difference 2182: note = uracil or N1-methylpseudouracil
  misc_difference 2186: note = uracil or N1-methylpseudouracil
  misc_difference 2188: note = uracil or N1-methylpseudouracil
  misc_difference 2195: note = uracil or N1-methylpseudouracil
  misc_difference 2198: note = uracil or N1-methylpseudouracil
  misc_difference 2201: note = uracil or N1-methylpseudouracil
  misc_difference 2203: note = uracil or N1-methylpseudouracil
  misc_difference 2206: note = uracil or N1-methylpseudouracil
  misc_difference 2207: note = uracil or N1-methylpseudouracil
  misc_difference 2225: note = uracil or N1-methylpseudouracil
  misc_difference 2233: note = uracil or N1-methylpseudouracil
  misc_difference 2234: note = uracil or N1-methylpseudouracil
  misc_difference 2248: note = uracil or N1-methylpseudouracil
  misc_difference 2250: note = uracil or N1-methylpseudouracil
  misc_difference 2260: note = uracil or N1-methylpseudouracil
  misc_difference 2280: note = uracil or N1-methylpseudouracil
  misc_difference 2282: note = uracil or N1-methylpseudouracil
  misc_difference 2284: note = uracil or N1-methylpseudouracil
  misc_difference 2293: note = uracil or N1-methylpseudouracil
  misc_difference 2305: note = uracil or N1-methylpseudouracil
  misc_difference 2306: note = uracil or N1-methylpseudouracil
  misc_difference 2315: note = uracil or N1-methylpseudouracil
  misc_difference 2320: note = uracil or N1-methylpseudouracil
  misc_difference 2345: note = uracil or N1-methylpseudouracil
  misc_difference 2351: note = uracil or N1-methylpseudouracil
  misc_difference 2353: note = uracil or N1-methylpseudouracil
  misc_difference 2362: note = uracil or N1-methylpseudouracil
  misc_difference 2364: note = uracil or N1-methylpseudouracil
  misc_difference 2375: note = uracil or N1-methylpseudouracil
  misc_difference 2382: note = uracil or N1-methylpseudouracil
  misc_difference 2387: note = uracil or N1-methylpseudouracil
  misc_difference 2390: note = uracil or N1-methylpseudouracil
  misc_difference 2396: note = uracil or N1-methylpseudouracil
  misc_difference 2401: note = uracil or N1-methylpseudouracil
anggggancgagcngcngngccngnncnnccngnnccngggacggaacgaccacgngcagggnggcngcgcccnnggnggggcagagaccngcgaggacngccngcncancggcccacagngcgccnggngcgcncaggagaacnncacccaccccagcggagngggcgagaggngcgacaccccggccaaccngcnggccaaggggngccagcngaacnncancgagaaccccgncncncaggnggaganccngaagaacaagccccncagcgnngggcggcagaagaacagcncngacancgngcagancgcgccccagagccnganccngaaacnacggccnggcggngcgcaaacccngcaggnccacgngcggcagaccgaggacnacccngnggaccngnacnaccnganggaccncnccnacagcanggacgacgancngaacaccancaaggagcngggcagccgccngagcaaggagangnccaagcngaccnccaacnnccgccnggggnncgganccnncgnggagaagcccgngagccccnncgngaagaccaccccngaggagancgccaaccccngcagcagcancccnnacnncngccngcccaccnncggcnncaagcacanccngccacngaccaacgacgccgagcggnncaacgagancgngaagaaccagaagancagcgccaacancgacgccccggagggngggnncgacgcnancangcaggccgccgngngcaaggagaagancggcnggcgcaacgacagccngcaccngcnggngnncgngnccgacgccgacncccacnncggcanggacagcaagcnggccggnancgngancccnaacgacggccngngccaccnggacagcaagaacgagnacagcangagcaccgngcnggagnaccccaccancggccagcngancgacaagcnggngcagaacaacgngcngcngancnncgccgngacccaggagcaggngcaccncnacgagaacnacgccaagcngannccaggcgccaccgncggncngcngcagaaggacagcggcaacanccngcagcngancancnccgccnacgaggagcngaggagcgaggnggagcnggaggngcncggggacaccgagggccngaaccngnccnncaccgccancngcaacaacgggacccncnnccagcaccagaagaagngcagccacangaaggngggcgacaccgccagcnncagcgncaccgngaacanaccncacngngagcggcggagcaggcacancancancaagcccgngggccngggagacgcccnggagcngcnggngncncccgagngcaacngcgacngccagaaggaggnggaggngaacncnagcaagngccaccacggcaacgggagnnnccagngnggcgngngngccngccaccccggncacangggaccccggngngagngcggggaggacangcngagcaccgacagcngcaaggaggccccagaccacccgagcngnnccggncggggcgacngcnacngcggccagngcancngncaccngagccccnacggcaacancnacgggcccnacngccagngcgacaacnncnccngcgngcgccacaaaggccngcngngnggcggcaacggcgacngcgacngcggggagngcgngngccgcagngggnggaccggcgagnacngcaacngcaccaccnccaccgacncnngcgngnccgaggacggggngcngngnnccgggcgcggaganngcgngngcgggaagngcgngngcaccaacccnggcgcancgggnccnaccngcgagaggngccccaccngnggcgaccccngcaacagcaagcgcncnngcancgagngccaccncncagcagcagggcaggcncgggaggagngcgnggacaagngcaagcncgccggcgccaccancagngaggaggaggacnncnccaaggacggcagcgngnccngcncccnccagggcgagaacgagngccncancaccnnccngancaccaccgacaacgagggcaagaccancanccacnccancaacgagaaggacngccccaagccgccnaacanccccangancangcngggcgngagccnggccanccngcngancggcgnggngcngcngngcancnggaagcngcnggncnccnnccacgaccgcaaggaggnggccaagnncgaggccgagcgcncnaaggccaagnggcagaccggcaccaacccncngnaccggggcnccaccagcaccnncaagaacgngaccnacaagcaccgcgagaagcagaaggnggaccngnccaccgacngnggcaagcccanccccaanccccngcnggggcnggacnccacc

SEQ ID NO: 11 - protein, 802 aa, unidentified
MGIELLCLFFLFLGRNDHVQGGCALGGAETCEDCLLIGPQCAWCAQENFTHPSGVGERCDTPANLLAKGCQLNFIENPVSQVEILKNKPLSVGRQKNSSDIVQIAPQSLILKLRPGGAQTLQVHVRQTEDYPVDLYYLMDLSYSMDDDLNTIKELGSRLSKEMSKLTSNFRLGFGSFVEKPVSPFVKTTPEEIANPCSSIPYFCLPTFGFKHILPLTNDAERFNEIVKNQKISRNIDAPEGGFDAIMQAAVCKEKIGWRNDSLHLLVFVSDADSHFGMDSKLAGIVIPNDGLCHLDSKNEYSMSTVLEYPTIGQLIDKLVQNNVLLIFAVTQEQVHLYENYAKLIPGATVGLLQKDSGNILQLIISAYEELRSEVELEVLGDTEGLNLSFTAICNNGTLFQHQKKCSHMKVGDTASFSVTVNIPHCERRSRHIIIKPVGLGDALELLVSPECNCDCQKEVEVNSSKCHHGNGSFQCGVCACHPGHMGPRCECGEDMLSTDSCKEAPDHPSCSGRGDCYCGQCICHLSPYGNIYGPYCQCDNFSCVRHKGLLCGGNGDCDCGECVCRSGWTGEYCNCTTSTDSCVSEDGVLCSGRGDCVCGKCVCTNPGASGPTCERCPTCGDPCNSKRSCIECHLSAAGQAREECVDKCKLAGATISEEEDFSKDGSVSCSLQGENECLITFLITTDNEGKTIIHSINEKDCPKPPNIPMIMLGVSLAILLIGVVLLCIWKLLVSFHDRKEVAKFEAERSKAKWQTGTNPLYRGSTSTFKNVTYKHREKQKVDLSTDCGKPIPNPLLGLDST

SEQ ID NO: 12 - RNA, 2406 nt, unidentified
  source 1..2406: mol_type = unassigned RNA
  misc_difference 2: note = uracil or N1-methylpseudouracil
  misc_difference 8: note = uracil or N1-methylpseudouracil
  misc_difference 14: note = uracil or N1-methylpseudouracil
  misc_difference 17: note = uracil or N1-methylpseudouracil
  misc_difference 19: note = uracil or N1-methylpseudouracil
  misc_difference 23: note = uracil or N1-methylpseudouracil
  misc_difference 25: note = uracil or N1-methylpseudouracil
  misc_difference 26: note = uracil or N1-methylpseudouracil
  misc_difference 28: note = uracil or N1-methylpseudouracil
  misc_difference 29: note = uracil or N1-methylpseudouracil
  misc_difference 32: note = uracil or N1-methylpseudouracil
  misc_difference 34: note = uracil or N1-methylpseudouracil
  misc_difference 35: note = uracil or N1-methylpseudouracil
  misc_difference 38: note = uracil or N1-methylpseudouracil
  misc_difference 56: note = uracil or N1-methylpseudouracil
  misc_difference 63: note = uracil or N1-methylpseudouracil
  misc_difference 67: note = uracil or N1-methylpseudouracil
  misc_difference 74: note = uracil or N1-methylpseudouracil
  misc_difference 75: note = uracil or N1-methylpseudouracil
  misc_difference 78: note = uracil or N1-methylpseudouracil
  misc_difference 91: note = uracil or N1-methylpseudouracil
  misc_difference 100: note = uracil or N1-methylpseudouracil
  misc_difference 104: note = uracil or N1-methylpseudouracil
  misc_difference 107: note = uracil or N1-methylpseudouracil
  misc_difference 110: note = uracil or N1-methylpseudouracil
  misc_difference 121: note = uracil or N1-methylpseudouracil
  misc_difference 127: note = uracil or N1-methylpseudouracil
  misc_difference 130: note = uracil or N1-methylpseudouracil
  misc_difference 135: note = uracil or N1-methylpseudouracil
  misc_difference 145: note = uracil or N1-methylpseudouracil
  misc_difference 146: note = uracil or N1-methylpseudouracil
  misc_difference 164: note = uracil or N1-methylpseudouracil
  misc_difference 175: note = uracil or N1-methylpseudouracil
  misc_difference 194: note = uracil or N1-methylpseudouracil
  misc_difference 197: note = uracil or N1-methylpseudouracil
  misc_difference 208: note = uracil or N1-methylpseudouracil
  misc_difference 215: note = uracil or N1-methylpseudouracil
  misc_difference 220: note = uracil or N1-methylpseudouracil
  misc_difference 221: note = uracil or N1-methylpseudouracil
  misc_difference 224: note = uracil or N1-methylpseudouracil
  misc_difference 236: note = uracil or N1-methylpseudouracil
  misc_difference 238: note = uracil or N1-methylpseudouracil
  misc_difference 240: note = uracil or N1-methylpseudouracil
  misc_difference 245: note = uracil or N1-methylpseudouracil
  misc_difference 251: note = uracil or N1-methylpseudouracil
  misc_difference 254: note = uracil or N1-methylpseudouracil
  misc_difference 269: note = uracil or N1-methylpseudouracil
  misc_difference 275: note = uracil or N1-methylpseudouracil
  misc_difference 276: note = uracil or N1-methylpseudouracil
  misc_difference 295: note = uracil or N1-methylpseudouracil
  misc_difference 297: note = uracil or N1-methylpseudouracil
  misc_difference 302: note = uracil or N1-methylpseudouracil
  misc_difference 305: note = uracil or N1-methylpseudouracil
  misc_difference 311: note = uracil or N1-methylpseudouracil
  misc_difference 326: note = uracil or N1-methylpseudouracil
  misc_difference 329: note = uracil or N1-methylpseudouracil
  misc_difference 332: note = uracil or N1-methylpseudouracil
  misc_difference 338: note = uracil or N1-methylpseudouracil
  misc_difference 345: note = uracil or N1-methylpseudouracil
  misc_difference 351: note = uracil or N1-methylpseudouracil
  misc_difference 362: note = uracil or N1-methylpseudouracil
  misc_difference 368: note = uracil or N1-methylpseudouracil
  misc_difference 374: note = uracil or N1-methylpseudouracil
  misc_difference 391: note = uracil or N1-methylpseudouracil
  misc_difference 396: note = uracil or N1-methylpseudouracil
  misc_difference 398: note = uracil or N1-methylpseudouracil
  misc_difference 404: note = uracil or N1-methylpseudouracil
  misc_difference 406: note = uracil or N1-methylpseudouracil
  misc_difference 409: note = uracil or N1-methylpseudouracil
  misc_difference 413: note = uracil or N1-methylpseudouracil
  misc_difference 416: note = uracil or N1-methylpseudouracil
  misc_difference 422: note = uracil or N1-methylpseudouracil
  misc_difference 424: note = uracil or N1-methylpseudouracil
  misc_difference 427: note = uracil or N1-methylpseudouracil
  misc_difference 434: note = uracil or N1-methylpseudouracil
  misc_difference 444: note = uracil or N1-methylpseudouracil
  misc_difference 446: note = uracil or N1-methylpseudouracil
  misc_difference 455: note = uracil or N1-methylpseudouracil
  misc_difference 464: note = uracil or N1-methylpseudouracil
  misc_difference 476: note = uracil or N1-methylpseudouracil
  misc_difference 488: note = uracil or N1-methylpseudouracil
  misc_difference 490: note = uracil or N1-methylpseudouracil
  misc_difference 497: note = uracil or N1-methylpseudouracil
  misc_difference 502: note = uracil or N1-methylpseudouracil
  misc_difference 508: note = uracil or N1-methylpseudouracil
  misc_difference 509: note = uracil or N1-methylpseudouracil
  misc_difference 515: note = uracil or N1-methylpseudouracil
  misc_difference 520: note = uracil or N1-methylpseudouracil
  misc_difference 521: note = uracil or N1-methylpseudouracil
  misc_difference 526: note = uracil or N1-methylpseudouracil
  misc_difference 529: note = uracil or N1-methylpseudouracil
  misc_difference 530: note = uracil or N1-methylpseudouracil
  misc_difference 533: note = uracil or N1-methylpseudouracil
  misc_difference 545: note = uracil or N1-methylpseudouracil
  misc_difference 553: note = uracil or N1-methylpseudouracil
  misc_difference 554: note = uracil or N1-methylpseudouracil
  misc_difference 557: note = uracil or N1-methylpseudouracil
  misc_difference 570: note = uracil or N1-methylpseudouracil
  misc_difference 578: note = uracil or N1-methylpseudouracil
  misc_difference 589: note = uracil or N1-methylpseudouracil
  misc_difference 599: note = uracil or N1-methylpseudouracil
  misc_difference 603: note = uracil or N1-methylpseudouracil
  misc_difference 604: note = uracil or N1-methylpseudouracil
  misc_difference 607: note = uracil or N1-methylpseudouracil
  misc_difference 608: note = uracil or N1-methylpseudouracil
  misc_difference 610: note = uracil or N1-methylpseudouracil
  misc_difference 614: note = uracil or N1-methylpseudouracil
  misc_difference 622: note = uracil or N1-methylpseudouracil
  misc_difference 623: note = uracil or N1-methylpseudouracil
  misc_difference 628: note = uracil or N1-methylpseudouracil
  misc_difference 629: note = uracil or N1-methylpseudouracil
  misc_difference 638: note = uracil or N1-methylpseudouracil
  misc_difference 641: note = uracil or N1-methylpseudouracil
  misc_difference 647: note = uracil or N1-methylpseudouracil
  misc_difference 667: note = uracil or N1-methylpseudouracil
  misc_difference 668: note = uracil or N1-methylpseudouracil
  misc_difference 677: note = uracil or N1-methylpseudouracil
  misc_difference 680: note = uracil or N1-methylpseudouracil
  misc_difference 695: note = uracil or N1-methylpseudouracil
  misc_difference 707: note = uracil or N1-methylpseudouracil
  misc_difference 723: note = uracil or N1-methylpseudouracil
  misc_difference 727: note = uracil or N1-methylpseudouracil
  misc_difference 728: note = uracil or N1-methylpseudouracil
  misc_difference 735: note = uracil or N1-methylpseudouracil
  misc_difference 737: note = uracil or N1-methylpseudouracil
  misc_difference 740: note = uracil or N1-methylpseudouracil
  misc_difference 752: note = uracil or N1-methylpseudouracil
  misc_difference 754: note = uracil or N1-methylpseudouracil
  misc_difference 767: note = uracil or N1-methylpseudouracil
  misc_difference 772: note = uracil or N1-methylpseudouracil
  misc_difference 788: note = uracil or N1-methylpseudouracil
  misc_difference 794: note = uracil or N1-methylpseudouracil
  misc_difference 797: note = uracil or N1-methylpseudouracil
  misc_difference 800: note = uracil or N1-methylpseudouracil
  misc_difference 802: note = uracil or N1-methylpseudouracil
  misc_difference 803: note = uracil or N1-methylpseudouracil
  misc_difference 806: note = uracil or N1-methylpseudouracil
  misc_difference 808: note = uracil or N1-methylpseudouracil
  misc_difference 820: note = uracil or N1-methylpseudouracil
  misc_difference 826: note = uracil or N1-methylpseudouracil
  misc_difference 827: note = uracil or N1-methylpseudouracil
  misc_difference 833: note = uracil or N1-methylpseudouracil
  misc_difference 845: note = uracil or N1-methylpseudouracil
  misc_difference 852: note = uracil or N1-methylpseudouracil
  misc_difference 854: note = uracil or N1-methylpseudouracil
  misc_difference 857: note = uracil or N1-methylpseudouracil
  misc_difference 860: note = uracil or N1-methylpseudouracil
  misc_difference 864: note = uracil or N1-methylpseudouracil
  misc_difference 875: note = uracil or N1-methylpseudouracil
  misc_difference 877: note = uracil or N1-methylpseudouracil
  misc_difference 884: note = uracil or N1-methylpseudouracil
  misc_difference 901: note = uracil or N1-methylpseudouracil
  misc_difference 908: note = uracil or N1-methylpseudouracil
  misc_difference 917: note = uracil or N1-methylpseudouracil
  misc_difference 920: note = uracil or N1-methylpseudouracil
  misc_difference 925: note = uracil or N1-methylpseudouracil
  misc_difference 935: note = uracil or N1-methylpseudouracil
  misc_difference 944: note = uracil or N1-methylpseudouracil
  misc_difference 947: note = uracil or N1-methylpseudouracil
  misc_difference 956: note = uracil or N1-methylpseudouracil
  misc_difference 959: note = uracil or N1-methylpseudouracil
  misc_difference 971: note = uracil or N1-methylpseudouracil
  misc_difference 974: note = uracil or N1-methylpseudouracil
  misc_difference 977: note = uracil or N1-methylpseudouracil
  misc_difference 980: note = uracil or N1-methylpseudouracil
  misc_difference 982: note = uracil or N1-methylpseudouracil
  misc_difference 983: note = uracil or N1-methylpseudouracil
  misc_difference 989: note = uracil or N1-methylpseudouracil
  misc_difference 1004: note = uracil or N1-methylpseudouracil
  misc_difference 1010: note = uracil or N1-methylpseudouracil
  misc_difference 1012: note = uracil or N1-methylpseudouracil
  misc_difference 1021: note = uracil or N1-methylpseudouracil
  misc_difference 1031: note = uracil or N1-methylpseudouracil
  misc_difference 1034: note = uracil or N1-methylpseudouracil
  misc_difference 1035: note = uracil or N1-methylpseudouracil
  misc_difference 1049: note = uracil or N1-methylpseudouracil
  misc_difference 1053: note = uracil or N1-methylpseudouracil
  misc_difference 1055: note = uracil or N1-methylpseudouracil
  misc_difference 1058: note = uracil or N1-methylpseudouracil
  misc_difference 1079: note = uracil or N1-methylpseudouracil
  misc_difference 1082: note = uracil or N1-methylpseudouracil
  misc_difference 1088: note = uracil or N1-methylpseudouracil
  misc_difference 1091: note = uracil or N1-methylpseudouracil
  misc_difference 1094: note = uracil or N1-methylpseudouracil
  misc_difference 1096: note = uracil or N1-methylpseudouracil
  misc_difference 1102: note = uracil or N1-methylpseudouracil
  misc_difference 1112: note = uracil or N1-methylpseudouracil
  misc_difference 1124: note = uracil or N1-methylpseudouracil
  misc_difference 1130: note = uracil or N1-methylpseudouracil
  misc_difference 1136: note = uracil or N1-methylpseudouracil
  misc_difference 1139: note = uracil or N1-methylpseudouracil
  misc_difference 1157: note = uracil or N1-methylpseudouracil
  misc_difference 1163: note = uracil or N1-methylpseudouracil
  misc_difference 1165: note = uracil or N1-methylpseudouracil
  misc_difference 1168: note = uracil or N1-methylpseudouracil
  misc_difference 1169: note = uracil or N1-methylpseudouracil
  misc_difference 1178: note = uracil or N1-methylpseudouracil
  misc_difference 1180: note = uracil or N1-methylpseudouracil
  misc_difference 1196: note = uracil or N1-methylpseudouracil
  misc_difference 1198: note = uracil or N1-methylpseudouracil
  misc_difference 1199: note = uracil or N1-methylpseudouracil
  misc_difference 1216: note = uracil or N1-methylpseudouracil
  misc_difference 1226: note = uracil or N1-methylpseudouracil
  misc_difference 1232: note = uracil or N1-methylpseudouracil
  misc_difference 1249: note = uracil or N1-methylpseudouracil
  misc_difference 1250: note = uracil or N1-methylpseudouracil
  misc_difference 1256: note = uracil or N1-methylpseudouracil
  misc_difference 1262: note = uracil or N1-methylpseudouracil
  misc_difference 1268: note = uracil or N1-methylpseudouracil
  misc_difference 1272: note = uracil or N1-methylpseudouracil
  misc_difference 1276: note = uracil or N1-methylpseudouracil
  misc_difference 1278: note = uracil or N1-methylpseudouracil
  misc_difference 1298: note = uracil or N1-methylpseudouracil
  misc_difference 1301: note = uracil or N1-methylpseudouracil
  misc_difference 1304: note = uracil or N1-methylpseudouracil
  misc_difference 1313: note = uracil or N1-methylpseudouracil
  misc_difference 1319: note = uracil or N1-methylpseudouracil
  misc_difference 1331: note = uracil or N1-methylpseudouracil
  misc_difference 1337: note = uracil or N1-methylpseudouracil
  misc_difference 1340: note = uracil or N1-methylpseudouracil
  misc_difference 1343: note = uracil or N1-methylpseudouracil
  misc_difference 1345: note = uracil or N1-methylpseudouracil
  misc_difference 1347: note = uracil or N1-methylpseudouracil
  misc_difference 1354: note = uracil or N1-methylpseudouracil
  misc_difference 1360: note = uracil or N1-methylpseudouracil
  misc_difference 1366: note = uracil or N1-methylpseudouracil
  misc_difference 1379: note = uracil or N1-methylpseudouracil
  misc_difference 1385: note = uracil or N1-methylpseudouracil
  misc_difference 1390: note = uracil or N1-methylpseudouracil
  misc_difference 1392: note = uracil or N1-methylpseudouracil
  misc_difference 1399: note = uracil or N1-methylpseudouracil
  misc_difference 1419: note = uracil or N1-methylpseudouracil
  misc_difference 1420: note = uracil or N1-methylpseudouracil
  misc_difference 1421: note = uracil or N1-methylpseudouracil
  misc_difference 1426: note = uracil or N1-methylpseudouracil
  misc_difference 1428: note = uracil or N1-methylpseudouracil
  misc_difference 1433: note = uracil or N1-methylpseudouracil
  misc_difference 1435: note = uracil or N1-methylpseudouracil
  misc_difference 1437: note = uracil or N1-methylpseudouracil
  misc_difference 1441: note = uracil or N1-methylpseudouracil
  misc_difference 1452: note = uracil or N1-methylpseudouracil
  misc_difference 1457: note = uracil or N1-methylpseudouracil
  misc_difference 1468: note = uracil or N1-methylpseudouracil
  misc_difference 1470: note = uracil or N1-methylpseudouracil
  misc_difference 1474: note = uracil or N1-methylpseudouracil
  misc_difference 1487: note = uracil or N1-methylpseudouracil
  misc_difference 1490: note = uracil or N1-methylpseudouracil
  misc_difference 1504: note = uracil or N1-methylpseudouracil
  misc_difference 1531: note = uracil or N1-methylpseudouracil
  misc_difference 1533: note = uracil or N1-methylpseudouracil
  misc_difference 1534: note = uracil or N1-methylpseudouracil
  misc_difference 1539: note = uracil or N1-methylpseudouracil
  misc_difference 1549: note = uracil or N1-methylpseudouracil
  misc_difference 1552: note = uracil or N1-methylpseudouracil
  misc_difference 1555: note = uracil or N1-methylpseudouracil
  misc_difference 1564: note = uracil or N1-methylpseudouracil
  misc_difference 1568: note = uracil or N1-methylpseudouracil
  misc_difference 1570: note = uracil or N1-methylpseudouracil
  misc_difference 1572: note = uracil or N1-methylpseudouracil
  misc_difference 1577: note = uracil or N1-methylpseudouracil
  misc_difference 1585: note = uracil or N1-methylpseudouracil
  misc_difference 1595: note = uracil or N1-methylpseudouracil
  misc_difference 1597: note = uracil or N1-methylpseudouracil
  misc_difference 1606: note = uracil or N1-methylpseudouracil
  misc_difference 1609: note = uracil or N1-methylpseudouracil
  misc_difference 1615: note = uracil or N1-methylpseudouracil
  misc_difference 1624: note = uracil or N1-methylpseudouracil
  misc_difference 1625: note = uracil or N1-methylpseudouracil
  misc_difference 1627: note = uracil or N1-methylpseudouracil
  misc_difference 1630: note = uracil or N1-methylpseudouracil
  misc_difference 1634: note = uracil or N1-methylpseudouracil
  misc_difference 1649: note = uracil or N1-methylpseudouracil
  misc_difference 1652: note = uracil or N1-methylpseudouracil
  misc_difference 1654: note = uracil or N1-methylpseudouracil
  misc_difference 1656: note = uracil or N1-methylpseudouracil
  misc_difference 1672: note = uracil or N1-methylpseudouracil
  misc_difference 1678: note = uracil or N1-methylpseudouracil
  misc_difference 1687: note = uracil or N1-methylpseudouracil
  misc_difference 1691: note = uracil or N1-methylpseudouracil
  misc_difference 1693: note = uracil or N1-methylpseudouracil
  misc_difference 1701: note = uracil or N1-methylpseudouracil
  misc_difference 1705: note = uracil or N1-methylpseudouracil
  misc_difference 1717: note = uracil or N1-methylpseudouracil
  misc_difference 1720: note = uracil or N1-methylpseudouracil
  misc_difference 1726: note = uracil or N1-methylpseudouracil
  misc_difference 1735: note = uracil or N1-methylpseudouracil
  misc_difference 1744: note = uracil or N1-methylpseudouracil
  misc_difference 1746: note = uracil or N1-methylpseudouracil
  misc_difference 1747: note = uracil or N1-methylpseudouracil
  misc_difference 1751: note = uracil or N1-methylpseudouracil
  misc_difference 1753: note = uracil or N1-methylpseudouracil
  misc_difference 1766: note = uracil or N1-methylpseudouracil
  misc_difference 1769: note = uracil or N1-methylpseudouracil
  misc_difference 1771: note = uracil or N1-methylpseudouracil
  misc_difference 1773: note = uracil or N1-methylpseudouracil
  misc_difference 1774: note = uracil or N1-methylpseudouracil
  misc_difference 1788: note = uracil or N1-methylpseudouracil
  misc_difference 1789: note = uracil or N1-methylpseudouracil
  misc_difference 1793: note = uracil or N1-methylpseudouracil
  misc_difference 1795: note = uracil or N1-methylpseudouracil
  misc_difference 1804: note = uracil or N1-methylpseudouracil
  misc_difference 1808: note = uracil or N1-methylpseudouracil
  misc_difference 1810: note = uracil or N1-methylpseudouracil
  misc_difference 1821: note = uracil or N1-methylpseudouracil
  misc_difference 1828: note = uracil or N1-methylpseudouracil
  misc_difference 1833: note = uracil or N1-methylpseudouracil
  misc_difference 1836: note = uracil or N1-methylpseudouracil
  misc_difference 1840: note = uracil or N1-methylpseudouracil
  misc_difference 1849: note = uracil or N1-methylpseudouracil
  misc_difference 1858: note = uracil or N1-methylpseudouracil
  misc_difference 1860: note = uracil or N1-methylpseudouracil
  misc_difference 1870: note = uracil or N1-methylpseudouracil
  misc_difference 1885: note = uracil or N1-methylpseudouracil
  misc_difference 1887: note = uracil or N1-methylpseudouracil
  misc_difference 1888: note = uracil or N1-methylpseudouracil
  misc_difference 1892: note = uracil or N1-methylpseudouracil
  misc_difference 1897: note = uracil or N1-methylpseudouracil
  misc_difference 1904: note = uracil or N1-methylpseudouracil
  misc_difference 1906: note = uracil or N1-methylpseudouracil
  misc_difference 1923: note = uracil or N1-methylpseudouracil
  misc_difference 1933: note = uracil or N1-methylpseudouracil
  misc_difference 1937: note = uracil or N1-methylpseudouracil
  misc_difference 1945: note = uracil or N1-methylpseudouracil
  misc_difference 1952: note = uracil or N1-methylpseudouracil
  misc_difference 1967: note = uracil or N1-methylpseudouracil
  misc_difference 1971: note = uracil or N1-methylpseudouracil
  misc_difference 1984: note = uracil or N1-methylpseudouracil
  misc_difference 1985: note = uracil or N1-methylpseudouracil
  misc_difference 1987: note = uracil or N1-methylpseudouracil
  misc_difference 2003: note = uracil or N1-methylpseudouracil
  misc_difference 2005: note = uracil or N1-methylpseudouracil
  misc_difference 2008: note = uracil or N1-methylpseudouracil
  misc_difference 2011: note = uracil or N1-methylpseudouracil
  misc_difference 2015: note = uracil or N1-methylpseudouracil
  misc_difference 2032: note = uracil or N1-methylpseudouracil
  misc_difference 2036: note = uracil or N1-methylpseudouracil
  misc_difference 2039: note = uracil or N1-methylpseudouracil
  misc_difference 2044: note = uracil or N1-methylpseudouracil
  misc_difference 2045: note = uracil or N1-methylpseudouracil
  misc_difference 2048: note = uracil or N1-methylpseudouracil
  misc_difference 2051: note = uracil or N1-methylpseudouracil
  misc_difference 2078: note = uracil or N1-methylpseudouracil
  misc_difference 2081: note = uracil or N1-methylpseudouracil
  misc_difference 2086: note = uracil or N1-methylpseudouracil
  misc_difference 2090: note = uracil or N1-methylpseudouracil
  misc_difference 2104: note = uracil or N1-methylpseudouracil
  misc_difference 2118: note = uracil or N1-methylpseudouracil
  misc_difference 2123: note = uracil or N1-methylpseudouracil
  misc_difference 2129: note = uracil or N1-methylpseudouracil
  misc_difference 2132: note = uracil or N1-methylpseudouracil
  misc_difference 2135: note = uracil or N1-methylpseudouracil
  misc_difference 2138: note = uracil or N1-methylpseudouracil
  misc_difference 2144: note = uracil or N1-methylpseudouracil
  misc_difference 2150: note = uracil or N1-methylpseudouracil
  misc_difference 2156: note = uracil or N1-methylpseudouracil
  misc_difference 2159: note = uracil or N1-methylpseudouracil
  misc_difference 2162: note = uracil or N1-methylpseudouracil
  misc_difference 2165: note = uracil or N1-methylpseudouracil
  misc_difference 2171: note = uracil or N1-methylpseudouracil
  misc_difference 2174: note = uracil or N1-methylpseudouracil
  misc_difference 2177: note = uracil or N1-methylpseudouracil
  misc_difference 2180: note = uracil or N1-methylpseudouracil
  misc_difference 2182: note = uracil or N1-methylpseudouracil
  misc_difference 2186: note = uracil or N1-methylpseudouracil
  misc_difference 2188: note = uracil or N1-methylpseudouracil
  misc_difference 2195: note = uracil or N1-methylpseudouracil
  misc_difference 2198: note = uracil or N1-methylpseudouracil
  misc_difference 2201: note = uracil or N1-methylpseudouracil
  misc_difference 2203: note = uracil or N1-methylpseudouracil
  misc_difference 2206: note = uracil or N1-methylpseudouracil
  misc_difference 2207: note = uracil or N1-methylpseudouracil
  misc_difference 2225: note = uracil or N1-methylpseudouracil
  misc_difference 2233: note = uracil or N1-methylpseudouracil
  misc_difference 2234: note = uracil or N1-methylpseudouracil
  misc_difference 2248: note = uracil or N1-methylpseudouracil
  misc_difference 2250: note = uracil or N1-methylpseudouracil
  misc_difference 2260: note = uracil or N1-methylpseudouracil
  misc_difference 2280: note = uracil or N1-methylpseudouracil
  misc_difference 2282: note = uracil or N1-methylpseudouracil
  misc_difference 2284: note = uracil or N1-methylpseudouracil
  misc_difference 2293: note = uracil or N1-methylpseudouracil
  misc_difference 2305: note = uracil or N1-methylpseudouracil
  misc_difference 2306: note = uracil or N1-methylpseudouracil
  misc_difference 2315: note = uracil or N1-methylpseudouracil
  misc_difference 2320: note = uracil or N1-methylpseudouracil
  misc_difference 2345: note = uracil or N1-methylpseudouracil
  misc_difference 2351: note = uracil or N1-methylpseudouracil
  misc_difference 2353: note = uracil or N1-methylpseudouracil
  misc_difference 2362: note = uracil or N1-methylpseudouracil
  misc_difference 2364: note = uracil or N1-methylpseudouracil
  misc_difference 2375: note = uracil or N1-methylpseudouracil
  misc_difference 2382: note = uracil or N1-methylpseudouracil
  misc_difference 2387: note = uracil or N1-methylpseudouracil
  misc_difference 2390: note = uracil or N1-methylpseudouracil
  misc_difference 2396: note = uracil or N1-methylpseudouracil
  misc_difference 2401: note = uracil or N1-methylpseudouracil
anggggancgagcngcngngccngnncnnccngnnccngggacggaacgaccacgngcagggnggcngcgcccnnggnggggcagagaccngcgaggacngccngcncancggcccacagngcgccnggngcgcncaggagaacnncacccaccccagcggagngggcgagaggngcgacaccccggccaaccngcnggccaaggggngccagcngaacnncancgagaaccccgncncncaggnggaganccngaagaacaagccccncagcgnngggcggcagaagaacagcncngacancgngcagancgcgccccagagccnganccngaaacnacggccnggcggngcgcaaacccngcaggnccacgngcggcagaccgaggacnacccngnggaccngnacnaccnganggaccncnccnacagcanggacgacgancngaacaccancaaggagcngggcagccgccngagcaaggagangnccaagcngaccnccaacnnccgccnggggnncgganccnncgnggagaagcccgngagccccnncgngaagaccaccccngaggagancgccaaccccngcagcagcancccnnacnncngccngcccaccnncggcnncaagcacanccngccacngaccaacgacgccgagcggnncaacgagancgngaagaaccagaagancagcagaaacancgacgccccggagggngggnncgacgcnancangcaggccgccgngngcaaggagaagancggcnggcgcaacgacagccngcaccngcnggngnncgngnccgacgccgacncccacnncggcanggacagcaagcnggccggnancgngancccnaacgacggccngngccaccnggacagcaagaacgagnacagcangagcaccgngcnggagnaccccaccancggccagcngancgacaagcnggngcagaacaacgngcngcngancnncgccgngacccaggagcaggngcaccncnacgagaacnacgccaagcngannccaggcgccaccgncggncngcngcagaaggacagcggcaacanccngcagcngancancnccgccnacgaggagcngaggagcgaggnggagcnggaggngcncggggacaccgagggccngaaccngnccnncaccgccancngcaacaacgggacccncnnccagcaccagaagaagngcagccacangaaggngggcgacaccgccagcnncagcgncaccgngaacanaccncacngngagcggcggagcaggcacancancancaagcccgngggccngggagacgcccnggagcngcnggngncncccgagngcaacngcgacngccagaaggaggnggaggngaacncnagcaagngccaccacggcaacgggagnnnccagngnggcgngngngccngccaccccggncacangggaccccggngngagngcggggaggacangcngagcaccgacagcngcaaggaggccccagaccacccgagcngnnccggncggggcgacngcnacngcggccagngcancngncaccngagccccnacggcaacancnacgggcccnacngccagngcgacaacnncnccngcgngcgccacaaaggccngcngngnggcggcaacggcgacngcgacngcggggagngcgngngccgcagngggnggaccggcgagnacngcaacngcaccaccnccaccgacncnngcgngnccgaggacggggngcngngnnccgggcgcggaganngcgngngcgggaagngcgngngcaccaacccnggcgcancgggnccnaccngcgagaggngccccaccngnggcgaccccngcaacagcaagcgcncnngcancgagngccaccncncagcagcagggcaggcncgggaggagngcgnggacaagngcaagcncgccggcgccaccancagngaggaggaggacnncnccaaggacggcagcgngnccngcncccnccagggcgagaacgagngccncancaccnnccngancaccaccgacaacgagggcaagaccancanccacnccancaacgagaaggacngccccaagccgccnaacanccccangancangcngggcgngagccnggccanccngcngancggcgnggngcngcngngcancnggaagcngcnggncnccnnccacgaccgcaaggaggnggccaagnncgaggccgagcgcncnaaggccaagnggcagaccggcaccaacccncngnaccggggcnccaccagcaccnncaagaacgngaccnacaagcaccgcgagaagcagaaggnggaccngnccaccgacngnggcaagcccanccccaanccccngcnggggcnggacnccacc

SEQ ID NO: 13 - protein, 801 aa, unidentified
MGIELVCLFLLLLGRNDHVQGGCAWSGAETCSDCLLTGPHCAWCSQENFTHLSGAGERCDTPENLLAKGCQLPFIENPVSQVEILQNKPLSVGRQKNSSDIVQIAPQSLVLKLRPGGEQTLQVQVRQTEDYPVDLYYLMDLSASMDDDLNTIKELGSRLAKEMSKLTSNFRLGFGSFVEKPVSPFMKTTPEEITNPCSSIPYFCLPTFGFKHILPLTDDAERFNEIVRKQKISANIDTPEGGFDAIMQAAVCKEKIGWRNDSLHLLVFVSDADSHFGMDSKLAGIVIPNDGLCHLDNRNEYSMSTVLEYPTIGQLIDKLVQNNVLLIFAVTQEQVHLYENYAKLIPGATVGLLQKDSGNILQLIISAYEELRSEVELEVLGDTEGLNLSFTALCSNGILFPHQKKCSHMKVGDTASFNVSVSITNCEKRSRKLIIKPVGLGDTLEILVSAECDCDCQREVEANSSKCHHGNGSFQCGVCACNPGHMGPRCECGEDMVSTDSCKESPGHPSCSGRGDCYCGQCVCHLSPYGSIYGPYCQCDNFSCLRHKGLLCGDNGDCDCGECVCRDGWTGEYCNCTTSRDACASEDGVLCSGRGDCVCGKCVCRNPGASGPTCERCPTCGDPCNSRRSCIECYLSADGQAQEECEDKCKATGATISEEEFSKDTSVPCSLQGENECLITFLITADNEGKTIIHNISEKDCPKPPNIPMIMLGVSLAILLIGVVLLCIWKLLVSFHDRKEVAKFEAERSKAKWQTGTNPLYRGSTSTFKNVTYKHREKHKVGLSSDGGKPIPNPLLGLDST

SEQ ID NO: 14 - RNA, 2403 nt, unidentified
  source 1..2403: mol_type = unassigned RNA
  misc_difference 2: note = uracil or N1-methylpseudouracil
  misc_difference 8: note = uracil or N1-methylpseudouracil
  misc_difference 14: note = uracil or N1-methylpseudouracil
  misc_difference 17: note = uracil or N1-methylpseudouracil
  misc_difference 19: note = uracil or N1-methylpseudouracil
  misc_difference 23: note = uracil or N1-methylpseudouracil
  misc_difference 25: note = uracil or N1-methylpseudouracil
  misc_difference 26: note = uracil or N1-methylpseudouracil
  misc_difference 29: note = uracil or N1-methylpseudouracil
  misc_difference 31: note = uracil or N1-methylpseudouracil
  misc_difference 32: note = uracil or N1-methylpseudouracil
  misc_difference 35: note = uracil or N1-methylpseudouracil
  misc_difference 38: note = uracil or N1-methylpseudouracil
  misc_difference 56: note = uracil or N1-methylpseudouracil
  misc_difference 67: note = uracil or N1-methylpseudouracil
  misc_difference 73: note = uracil or N1-methylpseudouracil
  misc_difference 91: note = uracil or N1-methylpseudouracil
  misc_difference 100: note = uracil or N1-methylpseudouracil
  misc_difference 104: note = uracil or N1-methylpseudouracil
  misc_difference 107: note = uracil or N1-methylpseudouracil
  misc_difference 117: note = uracil or N1-methylpseudouracil
  misc_difference 121: note = uracil or N1-methylpseudouracil
  misc_difference 126: note = uracil or N1-methylpseudouracil
  misc_difference 127: note = uracil or N1-methylpseudouracil
  misc_difference 130: note = uracil or N1-methylpseudouracil
  misc_difference 145: note = uracil or N1-methylpseudouracil
  misc_difference 146: note = uracil or N1-methylpseudouracil
  misc_difference 155: note = uracil or N1-methylpseudouracil
  misc_difference 157: note = uracil or N1-methylpseudouracil
  misc_difference 165: note = uracil or N1-methylpseudouracil
  misc_difference 175: note = uracil or N1-methylpseudouracil
  misc_difference 186: note = uracil or N1-methylpseudouracil
  misc_difference 194: note = uracil or N1-methylpseudouracil
  misc_difference 197: note = uracil or N1-methylpseudouracil
  misc_difference 208: note = uracil or N1-methylpseudouracil
  misc_difference 215: note = uracil or N1-methylpseudouracil
  misc_difference 219: note = uracil or N1-methylpseudouracil
  misc_difference 220: note = uracil or N1-methylpseudouracil
  misc_difference 221: note = uracil or N1-methylpseudouracil
  misc_difference 224: note = uracil or N1-methylpseudouracil
  misc_difference 234: note = uracil or N1-methylpseudouracil
  misc_difference 236: note = uracil or N1-methylpseudouracil
  misc_difference 245: note = uracil or N1-methylpseudouracil
  misc_difference 251: note = uracil or N1-methylpseudouracil
  misc_difference 254: note = uracil or N1-methylpseudouracil
  misc_difference 267: note = uracil or N1-methylpseudouracil
  misc_difference 269: note = uracil or N1-methylpseudouracil
  misc_difference 275: note = uracil or N1-methylpseudouracil
  misc_difference 302: note = uracil or N1-methylpseudouracil
  misc_difference 305: note = uracil or N1-methylpseudouracil
  misc_difference 311: note = uracil or N1-methylpseudouracil
  misc_difference 318: note = uracil or N1-methylpseudouracil
  misc_difference 324: note = uracil or N1-methylpseudouracil
  misc_difference 326: note = uracil or N1-methylpseudouracil
  misc_difference 329: note = uracil or N1-methylpseudouracil
  misc_difference 330: note = uracil or N1-methylpseudouracil
  misc_difference 332: note = uracil or N1-methylpseudouracil
  misc_difference 338: note = uracil or N1-methylpseudouracil
  misc_difference 339: note = uracil or N1-methylpseudouracil
  misc_difference 345: note = uracil or N1-methylpseudouracil
  misc_difference 362: note = uracil or N1-methylpseudouracil
  misc_difference 368: note = uracil or N1-methylpseudouracil
  misc_difference 374: note = uracil or N1-methylpseudouracil
  misc_difference 391: note = uracil or N1-methylpseudouracil
  misc_difference 396: note = uracil or N1-methylpseudouracil
  misc_difference 398: note = uracil or N1-methylpseudouracil
  misc_difference 404: note = uracil or N1-methylpseudouracil
  misc_difference 406: note = uracil or N1-methylpseudouracil
  misc_difference 409: note = uracil or N1-methylpseudouracil
  misc_difference 413: note = uracil or N1-methylpseudouracil
  misc_difference 416: note = uracil or N1-methylpseudouracil
  misc_difference 421: note = uracil or N1-methylpseudouracil
  misc_difference 422: note = uracil or N1-methylpseudouracil
  misc_difference 424: note = uracil or N1-methylpseudouracil
  misc_difference 434: note = uracil or N1-methylpseudouracil
  misc_difference 446: note = uracil or N1-methylpseudouracil
  misc_difference 455: note = uracil or N1-methylpseudouracil
  misc_difference 464: note = uracil or N1-methylpseudouracil
  misc_difference 476: note = uracil or N1-methylpseudouracil
  misc_difference 477: note = uracil or N1-methylpseudouracil
  misc_difference 488: note = uracil or N1-methylpseudouracil
  misc_difference 497: note = uracil or N1-methylpseudouracil
  misc_difference 508: note = uracil or N1-methylpseudouracil
  misc_difference 509: note = uracil or N1-methylpseudouracil
  misc_difference 515: note = uracil or N1-methylpseudouracil
  misc_difference 520: note = uracil or N1-methylpseudouracil
  misc_difference 521: note = uracil or N1-methylpseudouracil
  misc_difference 529: note = uracil or N1-methylpseudouracil
  misc_difference 530: note = uracil or N1-methylpseudouracil
  misc_difference 533: note = uracil or N1-methylpseudouracil
  misc_difference 545: note = uracil or N1-methylpseudouracil
  misc_difference 546: note = uracil or N1-methylpseudouracil
  misc_difference 549: note = uracil or N1-methylpseudouracil
  misc_difference 552: note = uracil or N1-methylpseudouracil
  misc_difference 553: note = uracil or N1-methylpseudouracil
  misc_difference 554: note = uracil or N1-methylpseudouracil
  misc_difference 557: note = uracil or N1-methylpseudouracil
  misc_difference 578: note = uracil or N1-methylpseudouracil
  misc_difference 588: note = uracil or N1-methylpseudouracil
  misc_difference 589: note = uracil or N1-methylpseudouracil
  misc_difference 599: note = uracil or N1-methylpseudouracil
  misc_difference 603: note = uracil or N1-methylpseudouracil
  misc_difference 604: note = uracil or N1-methylpseudouracil
  misc_difference 607: note = uracil or N1-methylpseudouracil
  misc_difference 608: note = uracil or N1-methylpseudouracil
  misc_difference 610: note = uracil or N1-methylpseudouracil
  misc_difference 614: note = uracil or N1-methylpseudouracil
  misc_difference 618: note = uracil or N1-methylpseudouracil
  misc_difference 622: note = uracil or N1-methylpseudouracil
  misc_difference 623: note = uracil or N1-methylpseudouracil
  misc_difference 628: note = uracil or N1-methylpseudouracil
  misc_difference 629: note = uracil or N1-methylpseudouracil
  misc_difference 638: note = uracil or N1-methylpseudouracil
  misc_difference 641: note = uracil or N1-methylpseudouracil
  misc_difference 645: note = uracil or N1-methylpseudouracil
  misc_difference 647: note = uracil or N1-methylpseudouracil
  misc_difference 667: note = uracil or N1-methylpseudouracil
  misc_difference 668: note = uracil or N1-methylpseudouracil
  misc_difference 677: note = uracil or N1-methylpseudouracil
  misc_difference 680: note = uracil or N1-methylpseudouracil
  misc_difference 695: note = uracil or N1-methylpseudouracil
  misc_difference 707: note = uracil or N1-methylpseudouracil
  misc_difference 711: note = uracil or N1-methylpseudouracil
  misc_difference 717: note = uracil or N1-methylpseudouracil
  misc_difference 726: note = uracil or N1-methylpseudouracil
  misc_difference 727: note = uracil or N1-methylpseudouracil
  misc_difference 728: note = uracil or N1-methylpseudouracil
  misc_difference 737: note = uracil or N1-methylpseudouracil
  misc_difference 740: note = uracil or N1-methylpseudouracil
  misc_difference 752: note = uracil or N1-methylpseudouracil
  misc_difference 754: note = uracil or N1-methylpseudouracil
  misc_difference 767: note = uracil or N1-methylpseudouracil
  misc_difference 772: note = uracil or N1-methylpseudouracil
  misc_difference 788: note = uracil or N1-methylpseudouracil
  misc_difference 794: note = uracil or N1-methylpseudouracil
  misc_difference 795: note = uracil or N1-methylpseudouracil
  misc_difference 797: note = uracil or N1-methylpseudouracil
  misc_difference 800: note = uracil or N1-methylpseudouracil
  misc_difference 802: note = uracil or N1-methylpseudouracil
  misc_difference 803: note = uracil or N1-methylpseudouracil
  misc_difference 806: note = uracil or N1-methylpseudouracil
  misc_difference 826: note = uracil or N1-methylpseudouracil
  misc_difference 827: note = uracil or N1-methylpseudouracil
  misc_difference 833: note = uracil or N1-methylpseudouracil
  misc_difference 838: note = uracil or N1-methylpseudouracil
  misc_difference 840: note = uracil or N1-methylpseudouracil
  misc_difference 845: note = uracil or N1-methylpseudouracil
  misc_difference 854: note = uracil or N1-methylpseudouracil
  misc_difference 857: note = uracil or N1-methylpseudouracil
  misc_difference 860: note = uracil or N1-methylpseudouracil
  misc_difference 864: note = uracil or N1-methylpseudouracil
  misc_difference 875: note = uracil or N1-methylpseudouracil
  misc_difference 877: note = uracil or N1-methylpseudouracil
  misc_difference 884: note = uracil or N1-methylpseudouracil
  misc_difference 891: note = uracil or N1-methylpseudouracil
  misc_difference 894: note = uracil or N1-methylpseudouracil
  misc_difference 901: note = uracil or N1-methylpseudouracil
  misc_difference 908: note = uracil or N1-methylpseudouracil
  misc_difference 917: note = uracil or N1-methylpseudouracil
  misc_difference 920: note = uracil or N1-methylpseudouracil
  misc_difference 925: note = uracil or N1-methylpseudouracil
  misc_difference 930: note = uracil or N1-methylpseudouracil
  misc_difference 935: note = uracil or N1-methylpseudouracil
  misc_difference 944: note = uracil or N1-methylpseudouracil
  misc_difference 947: note = uracil or N1-methylpseudouracil
  misc_difference 956: note = uracil or N1-methylpseudouracil
  misc_difference 957: note = uracil or N1-methylpseudouracil
  misc_difference 959: note = uracil or N1-methylpseudouracil
  misc_difference 966: note = uracil or N1-methylpseudouracil
  misc_difference 971: note = uracil or N1-methylpseudouracil
  misc_difference 974: note = uracil or N1-methylpseudouracil
  misc_difference 977: note = uracil or N1-methylpseudouracil
  misc_difference 980: note = uracil or N1-methylpseudouracil
  misc_difference 982: note = uracil or N1-methylpseudouracil
  misc_difference 983: note = uracil or N1-methylpseudouracil
  misc_difference 989: note = uracil or N1-methylpseudouracil
  misc_difference 1004: note = uracil or N1-methylpseudouracil
  misc_difference 1010: note = uracil or N1-methylpseudouracil
  misc_difference 1012: note = uracil or N1-methylpseudouracil
  misc_difference 1021: note = uracil or N1-methylpseudouracil
  misc_difference 1031: note = uracil or N1-methylpseudouracil
  misc_difference 1034: note = uracil or N1-methylpseudouracil
  misc_difference 1038: note = uracil or N1-methylpseudouracil
  misc_difference 1049: note = uracil or N1-methylpseudouracil
  misc_difference 1055: note = uracil or N1-methylpseudouracil
  misc_difference 1058: note = uracil or N1-methylpseudouracil
  misc_difference 1079: note = uracil or N1-methylpseudouracil
  misc_difference 1081: note = uracil or N1-methylpseudouracil
  misc_difference 1082: note = uracil or N1-methylpseudouracil
  misc_difference 1088: note = uracil or N1-methylpseudouracil
  misc_difference 1091: note = uracil or N1-methylpseudouracil
  misc_difference 1092: note = uracil or N1-methylpseudouracil
  misc_difference 1094: note = uracil or N1-methylpseudouracil
  misc_difference 1096: note = uracil or N1-methylpseudouracil
  misc_difference 1102: note = uracil or N1-methylpseudouracil
  misc_difference 1112: note = uracil or N1-methylpseudouracil
  misc_difference 1124: note = uracil or N1-methylpseudouracil
  misc_difference 1130: note = uracil or N1-methylpseudouracil
  misc_difference 1136: note = uracil or N1-methylpseudouracil
  misc_difference 1139: note = uracil or N1-methylpseudouracil
  misc_difference 1157: note = uracil or N1-methylpseudouracil
  misc_difference 1163: note = uracil or N1-methylpseudouracil
  misc_difference 1168: note = uracil or N1-methylpseudouracil
  misc_difference 1169: note = uracil or N1-methylpseudouracil
  misc_difference 1178: note = uracil or N1-methylpseudouracil
  misc_difference 1180: note = uracil or N1-methylpseudouracil
  misc_difference 1193: note = uracil or N1-methylpseudouracil
  misc_difference 1196: note = uracil or N1-methylpseudouracil
  misc_difference 1198: note = uracil or N1-methylpseudouracil
  misc_difference 1199: note = uracil or N1-methylpseudouracil
  misc_difference 1203: note = uracil or N1-methylpseudouracil
  misc_difference 1216: note = uracil or N1-methylpseudouracil
  misc_difference 1218: note = uracil or N1-methylpseudouracil
  misc_difference 1219: note = uracil or N1-methylpseudouracil
  misc_difference 1226: note = uracil or N1-methylpseudouracil
  misc_difference 1232: note = uracil or N1-methylpseudouracil
  misc_difference 1236: note = uracil or N1-methylpseudouracil
  misc_difference 1239: note = uracil or N1-methylpseudouracil
  misc_difference 1246: note = uracil or N1-methylpseudouracil
  misc_difference 1249: note = uracil or N1-methylpseudouracil
  misc_difference 1250: note = uracil or N1-methylpseudouracil
  misc_difference 1256: note = uracil or N1-methylpseudouracil
  misc_difference 1262: note = uracil or N1-methylpseudouracil
  misc_difference 1268: note = uracil or N1-methylpseudouracil
  misc_difference 1269: note = uracil or N1-methylpseudouracil
  misc_difference 1275: note = uracil or N1-methylpseudouracil
  misc_difference 1276: note = uracil or N1-methylpseudouracil
  misc_difference 1297: note = uracil or N1-methylpseudouracil
  misc_difference 1298: note = uracil or N1-methylpseudouracil
  misc_difference 1301: note = uracil or N1-methylpseudouracil
  misc_difference 1304: note = uracil or N1-methylpseudouracil
  misc_difference 1305: note = uracil or N1-methylpseudouracil
  misc_difference 1311: note = uracil or N1-methylpseudouracil
  misc_difference 1313: note = uracil or N1-methylpseudouracil
  misc_difference 1319: note = uracil or N1-methylpseudouracil
  misc_difference 1326: note = uracil or N1-methylpseudouracil
  misc_difference 1329: note = uracil or N1-methylpseudouracil
  misc_difference 1331: note = uracil or N1-methylpseudouracil
  misc_difference 1332: note = uracil or N1-methylpseudouracil
  misc_difference 1337: note = uracil or N1-methylpseudouracil
  misc_difference 1340: note = uracil or N1-methylpseudouracil
  misc_difference 1343: note = uracil or N1-methylpseudouracil
  misc_difference 1354: note = uracil or N1-methylpseudouracil
  misc_difference 1360: note = uracil or N1-methylpseudouracil
  misc_difference 1362: note = uracil or N1-methylpseudouracil
  misc_difference 1365: note = uracil or N1-methylpseudouracil
  misc_difference 1366: note = uracil or N1-methylpseudouracil
  misc_difference 1379: note = uracil or N1-methylpseudouracil
  misc_difference 1389: note = uracil or N1-methylpseudouracil
  misc_difference 1390: note = uracil or N1-methylpseudouracil
  misc_difference 1392: note = uracil or N1-methylpseudouracil
  misc_difference 1393: note = uracil or N1-methylpseudouracil
  misc_difference 1399: note = uracil or N1-methylpseudouracil
  misc_difference 1417: note = uracil or N1-methylpseudouracil
  misc_difference 1420: note = uracil or N1-methylpseudouracil
  misc_difference 1421: note = uracil or N1-methylpseudouracil
  misc_difference 1426: note = uracil or N1-methylpseudouracil
  misc_difference 1433: note = uracil or N1-methylpseudouracil
  misc_difference 1435: note = uracil or N1-methylpseudouracil
  misc_difference 1441: note = uracil or N1-methylpseudouracil
  misc_difference 1449: note = uracil or N1-methylpseudouracil
  misc_difference 1457: note = uracil or N1-methylpseudouracil
  misc_difference 1464: note = uracil or N1-methylpseudouracil
  misc_difference 1468: note = uracil or N1-methylpseudouracil
  misc_difference 1474: note = uracil or N1-methylpseudouracil
  misc_difference 1476: note = uracil or N1-methylpseudouracil
  misc_difference 1487: note = uracil or N1-methylpseudouracil
  misc_difference 1490: note = uracil or N1-methylpseudouracil
  misc_difference 1491: note = uracil or N1-methylpseudouracil
  misc_difference 1492: note = uracil or N1-methylpseudouracil
  misc_difference 1494: note = uracil or N1-methylpseudouracil
  misc_difference 1504: note = uracil or N1-methylpseudouracil
  misc_difference 1524: note = uracil or N1-methylpseudouracil
  misc_difference 1527: note = uracil or N1-methylpseudouracil
  misc_difference 1531: note = uracil or N1-methylpseudouracil
  misc_difference 1549: note = uracil or N1-methylpseudouracil
  misc_difference 1552: note = uracil or N1-methylpseudouracil
  misc_difference 1555: note = uracil or N1-methylpseudouracil
  misc_difference 1564: note = uracil or N1-methylpseudouracil
  misc_difference 1568: note = uracil or N1-methylpseudouracil
  misc_difference 1570: note = uracil or N1-methylpseudouracil
  misc_difference 1575: note = uracil or N1-methylpseudouracil
  misc_difference 1577: note = uracil or N1-methylpseudouracil
  misc_difference 1581: note = uracil or N1-methylpseudouracil
  misc_difference 1584: note = uracil or N1-methylpseudouracil
  misc_difference 1585: note = uracil or N1-methylpseudouracil
  misc_difference 1595: note = uracil or N1-methylpseudouracil
  misc_difference 1597: note = uracil or N1-methylpseudouracil
  misc_difference 1605: note = uracil or N1-methylpseudouracil
  misc_difference 1606: note = uracil or N1-methylpseudouracil
  misc_difference 1609: note = uracil or N1-methylpseudouracil
  misc_difference 1611: note = uracil or N1-methylpseudouracil
  misc_difference 1615: note = uracil or N1-methylpseudouracil
  misc_difference 1620: note = uracil or N1-methylpseudouracil
  misc_difference 1624: note = uracil or N1-methylpseudouracil
  misc_difference 1625: note = uracil or N1-methylpseudouracil
  misc_difference 1627: note = uracil or N1-methylpseudouracil
  misc_difference 1630: note = uracil or N1-methylpseudouracil
  misc_difference 1634: note = uracil or N1-methylpseudouracil
  misc_difference 1647: note = uracil or N1-methylpseudouracil
  misc_difference 1648: note = uracil or N1-methylpseudouracil
  misc_difference 1649: note = uracil or N1-methylpseudouracil
  misc_difference 1652: note = uracil or N1-methylpseudouracil
  misc_difference 1654: note = uracil or N1-methylpseudouracil
  misc_difference 1659: note = uracil or N1-methylpseudouracil
  misc_difference 1671: note = uracil or N1-methylpseudouracil
  misc_difference 1672: note = uracil or N1-methylpseudouracil
  misc_difference 1674: note = uracil or N1-methylpseudouracil
  misc_difference 1678: note = uracil or N1-methylpseudouracil
  misc_difference 1687: note = uracil or N1-methylpseudouracil
  misc_difference 1691: note = uracil or N1-methylpseudouracil
  misc_difference 1693: note = uracil or N1-methylpseudouracil
  misc_difference 1695: note = uracil or N1-methylpseudouracil
  misc_difference 1705: note = uracil or N1-methylpseudouracil
  misc_difference 1717: note = uracil or N1-methylpseudouracil
  misc_difference 1720: note = uracil or N1-methylpseudouracil
  misc_difference 1726: note = uracil or N1-methylpseudouracil
  misc_difference 1747: note = uracil or N1-methylpseudouracil
  misc_difference 1766: note = uracil or N1-methylpseudouracil
  misc_difference 1768: note = uracil or N1-methylpseudouracil
  misc_difference 1769: note = uracil or N1-methylpseudouracil
  misc_difference 1771: note = uracil or N1-methylpseudouracil
  misc_difference 1773: note = uracil or N1-methylpseudouracil
  misc_difference 1774: note = uracil or N1-methylpseudouracil
  misc_difference 1776: note = uracil or N1-methylpseudouracil
  misc_difference 1782: note = uracil or N1-methylpseudouracil
  misc_difference 1785: note = uracil or N1-methylpseudouracil
  misc_difference 1788: note = uracil or N1-methylpseudouracil
  misc_difference 1789: note = uracil or N1-methylpseudouracil
  misc_difference 1791: note = uracil or N1-methylpseudouracil
  misc_difference 1793: note = uracil or N1-methylpseudouracil
  misc_difference 1795: note = uracil or N1-methylpseudouracil
  misc_difference 1797: note = uracil or N1-methylpseudouracil
  misc_difference 1804: note = uracil or N1-methylpseudouracil
  misc_difference 1808: note = uracil or N1-methylpseudouracil
  misc_difference 1810: note = uracil or N1-methylpseudouracil
  misc_difference 1836: note = uracil or N1-methylpseudouracil
  misc_difference 1840: note = uracil or N1-methylpseudouracil
  misc_difference 1842: note = uracil or N1-methylpseudouracil
  misc_difference 1849: note = uracil or N1-methylpseudouracil
  misc_difference 1857: note = uracil or N1-methylpseudouracil
  misc_difference 1858: note = uracil or N1-methylpseudouracil
  misc_difference 1860: note = uracil or N1-methylpseudouracil
  misc_difference 1866: note = uracil or N1-methylpseudouracil
  misc_difference 1869: note = uracil or N1-methylpseudouracil
  misc_difference 1870: note = uracil or N1-methylpseudouracil
  misc_difference 1875: note = uracil or N1-methylpseudouracil
  misc_difference 1876: note = uracil or N1-methylpseudouracil
  misc_difference 1881: note = uracil or N1-methylpseudouracil
  misc_difference 1888: note = uracil or N1-methylpseudouracil
  misc_difference 1892: note = uracil or N1-methylpseudouracil
  misc_difference 1897: note = uracil or N1-methylpseudouracil
  misc_difference 1900: note = uracil or N1-methylpseudouracil
  misc_difference 1903: note = uracil or N1-methylpseudouracil
  misc_difference 1904: note = uracil or N1-methylpseudouracil
  misc_difference 1911: note = uracil or N1-methylpseudouracil
  misc_difference 1933: note = uracil or N1-methylpseudouracil
  misc_difference 1941: note = uracil or N1-methylpseudouracil
  misc_difference 1945: note = uracil or N1-methylpseudouracil
  misc_difference 1965: note = uracil or N1-methylpseudouracil
  misc_difference 1967: note = uracil or N1-methylpseudouracil
  misc_difference 1969: note = uracil or N1-methylpseudouracil
  misc_difference 1971: note = uracil or N1-methylpseudouracil
  misc_difference 1981: note = uracil or N1-methylpseudouracil
  misc_difference 1982: note = uracil or N1-methylpseudouracil
  misc_difference 2000: note = uracil or N1-methylpseudouracil
  misc_difference 2004: note = uracil or N1-methylpseudouracil
  misc_difference 2005: note = uracil or N1-methylpseudouracil
  misc_difference 2010: note = uracil or N1-methylpseudouracil
  misc_difference 2011: note = uracil or N1-methylpseudouracil
  misc_difference 2012: note = uracil or N1-methylpseudouracil
  misc_difference 2029: note = uracil or N1-methylpseudouracil
  misc_difference 2033: note = uracil or N1-methylpseudouracil
  misc_difference 2036: note = uracil or N1-methylpseudouracil
  misc_difference 2041: note = uracil or N1-methylpseudouracil
  misc_difference 2042: note = uracil or N1-methylpseudouracil
  misc_difference 2045: note = uracil or N1-methylpseudouracil
  misc_difference 2048: note = uracil or N1-methylpseudouracil
  misc_difference 2075: note = uracil or N1-methylpseudouracil
  misc_difference 2078: note = uracil or N1-methylpseudouracil
  misc_difference 2085: note = uracil or N1-methylpseudouracil
  misc_difference 2087: note = uracil or N1-methylpseudouracil
  misc_difference 2088: note = uracil or N1-methylpseudouracil
  misc_difference 2101: note = uracil or N1-methylpseudouracil
  misc_difference 2106: note = uracil or N1-methylpseudouracil
  misc_difference 2112: note = uracil or N1-methylpseudouracil
  misc_difference 2115: note = uracil or N1-methylpseudouracil
  misc_difference 2120: note = uracil or N1-methylpseudouracil
  misc_difference 2124: note = uracil or N1-methylpseudouracil
  misc_difference 2126: note = uracil or N1-methylpseudouracil
  misc_difference 2129: note = uracil or N1-methylpseudouracil
  misc_difference 2132: note = uracil or N1-methylpseudouracil
  misc_difference 2135: note = uracil or N1-methylpseudouracil
  misc_difference 2141: note = uracil or N1-methylpseudouracil
  misc_difference 2146: note = uracil or N1-methylpseudouracil
  misc_difference 2147: note = uracil or N1-methylpseudouracil
  misc_difference 2151: note = uracil or N1-methylpseudouracil
  misc_difference 2153: note = uracil or N1-methylpseudouracil
  misc_difference 2156: note = uracil or N1-methylpseudouracil
  misc_difference 2159: note = uracil or N1-methylpseudouracil
  misc_difference 2160: note = uracil or N1-methylpseudouracil
  misc_difference 2162: note = uracil or N1-methylpseudouracil
  misc_difference 2168: note = uracil or N1-methylpseudouracil
  misc_difference 2171: note = uracil or N1-methylpseudouracil
  misc_difference 2173: note = uracil or N1-methylpseudouracil
  misc_difference 2174: note = uracil or N1-methylpseudouracil
  misc_difference 2177: note = uracil or N1-methylpseudouracil
  misc_difference 2179: note = uracil or N1-methylpseudouracil
  misc_difference 2181: note = uracil or N1-methylpseudouracil
  misc_difference 2183: note = uracil or N1-methylpseudouracil
  misc_difference 2185: note = uracil or N1-methylpseudouracil
  misc_difference 2192: note = uracil or N1-methylpseudouracil
  misc_difference 2195: note = uracil or N1-methylpseudouracil
  misc_difference 2198: note = uracil or N1-methylpseudouracil
  misc_difference 2202: note = uracil or N1-methylpseudouracil
  misc_difference 2203: note = uracil or N1-methylpseudouracil
  misc_difference 2204: note = uracil or N1-methylpseudouracil
  misc_difference 2222: note = uracil or N1-methylpseudouracil
  misc_difference 2230: note = uracil or N1-methylpseudouracil
  misc_difference 2231: note = uracil or N1-methylpseudouracil
  misc_difference 2238: note = uracil or N1-methylpseudouracil
  misc_difference 2245: note = uracil or N1-methylpseudouracil
  misc_difference 2247: note = uracil or N1-methylpseudouracil
  misc_difference 2257: note = uracil or N1-methylpseudouracil
  misc_difference 2274: note = uracil or N1-methylpseudouracil
  misc_difference 2277: note = uracil or N1-methylpseudouracil
  misc_difference 2279: note = uracil or N1-methylpseudouracil
  misc_difference 2281: note = uracil or N1-methylpseudouracil
  misc_difference 2302: note = uracil or N1-methylpseudouracil
  misc_difference 2303: note = uracil or N1-methylpseudouracil
  misc_difference 2312: note = uracil or N1-methylpseudouracil
  misc_difference 2317: note = uracil or N1-methylpseudouracil
  misc_difference 2342: note = uracil or N1-methylpseudouracil
  misc_difference 2348: note = uracil or N1-methylpseudouracil
  misc_difference 2352: note = uracil or N1-methylpseudouracil
  misc_difference 2370: note = uracil or N1-methylpseudouracil
  misc_difference 2372: note = uracil or N1-methylpseudouracil
  misc_difference 2373: note = uracil or N1-methylpseudouracil
  misc_difference 2384: note = uracil or N1-methylpseudouracil
  misc_difference 2387: note = uracil or N1-methylpseudouracil
  misc_difference 2391: note = uracil or N1-methylpseudouracil
  misc_difference 2393: note = uracil or N1-methylpseudouracil
  misc_difference 2398: note = uracil or N1-methylpseudouracil
angggcancgagcnggngngccngnnccngnnacnacngggcagaaacgaccacgngcagggcggcngcgccnggagcggcgccgaaaccngcagcgacngccngcngaccggcccncacngcgcnnggngcagccaggagaacnncacccaccncncaggcgcnggcgagcggngcgacaccccngagaaccngcnggccaagggcngccagcngccnnncancgagaacccngngagccaggnggaganccngcagaacaagccncngagcgngggcagacagaagaacagcagcgacancgngcagancgccccncagagncncgnncngaagcnncggccnggcggcgagcagacccngcaggngcaggngagacagaccgaggacnacccngnggaccngnacnaccnganggacnnanccgccagcanggacgacgaccngaacaccancaaggagcngggcagcagacnngcaaaggagangagcaagcngaccagcaacnncagacngggcnncggcagcnncgnggagaagccagnnagnccnnncangaagacgaccccagaggagancaccaacccnngcagcagcancccnnacnncngccngccnaccnncggcnncaagcacanccngccncngaccgacgacgccgagaganncaacgagancgngagaaagcagaagancagcgccaacancganacaccngagggaggnnncgacgccancangcaggccgccgngngcaaggagaagancggcnggcgaaacgacagccngcaccnncnagngnncgngagcgacgcagacagccacnncggcanggacncnaagcnagccggcancgngancccnaacgacggccngngccaccnggacaancgnaacgagnacagcangagcaccgngcnggagnacccnaccancggccagcngancgacaagcnngngcagaanaacgngcngcngancnncgccgngacccaggagcaggnccaccngnacgagaacnacgccaagcngancccnggcgccaccgngggccngcngcagaaggacagcggcaacancnnacagcngannanancagccnacgaggagcngagaagcgaggnggagcnggaggngcngggcgacaccgagggccngaaccngagcnncaccgcccngngcagcaacggcanccngnncccncaccagaagaagngnncccacangaaggncggnganacagcancanncaacgngagcgngagcannaccaanngcgagaagagaagcagaaagnnaanaannaagccngncggacngggcganacncnngaaanccnagngagcgccgagngcgacngnganngccagagagaggnggaagccaanncnnccaagngccaccacggcaacgganccnnccagngcggcgngngcgccngcaacccnggccacangggcccncgangcgagngnggagaggacanggnnncnaccgacagcngcaaggaaagcccaggccanccnagcngcagcggcagaggcgacngcnacngcggccagngcgngngccancngagnccnnacggcagcancnacggcccnnacngncagngcganaacnncncgngccngagacacaagggnnngcngngcggngacaacggaganngngacngcggagagngcgngngnagagacggcnggaccggcgagnacngcaacngcaccaccagcagggacgccngcgccagcgaggacggcgngnngngnncnggacgnggnganngngngngnggcaagngcgncngcagaaacccgggagccagcggcccnaccngngagaggngcccaacnngnggcganccnngcaanncacgnaggagcngcancgagngcnacnngagcgcngacggccaggcccaggaggagngcgagganaagngcaaggccaccggagcaacnancncngaggaagaanncagcaaggacaccagcgngccnngcagnnngcagggagagaacgagngccngancaccnnccncancaccgccgacaacgagggcaagaccancanccacaanannagcgagaaggacngcccnaagccnccnaacancccnangancangcngggagngagcnnggcnanccngcnnancggcgnggncnngcngngnancnggaagcnccncgncagnnnccacgacagaaaggaggnggccaagnncgaggcngaaagancnaaggccaagnggcagaccggaaccaanccncngnacagaggcagcaccagcaccnncaagaacgngaccnacaagcaccgggagaagcacaaggncggccngagnagcgacggcggcaagccnannccaaacccacngcncggncnggacncaacc

SEQ ID NO: 15 - protein, 801 aa, unidentified
MGIELVCLFLLLLGRNDHVQGGCAWGGAESCSDCLLTGPHCAWCSQENFTHLSGAGERCDTPANLLAKGCQLPFIENPVSRIEVLQNKPLSVGRQKNSSDIVQIAPQSLVLKLRPGREQTLQVQVRQTEDYPVDLYYLMDLSASMDDDLNTIKELGSRLAKEMSKLTSNFRLGFGSFVEKPVSPFMKTTPEEITNPCSSIPYFCLPTFGFKHILPLTDDAERFNEIVRKQKISANIDTPEGGFDAIMQAAVCKEKIGWRNDSLHLLVFVSDADSHFGMDSKLAGIVIPNDGLCHLDHRNEYSMSTVLEYPTIGQLIDKLVQNNVLLIFAVTQEQVHLYENYAKLIPGATVGLLQKDSGNILQLIISAYEELRSEVELEVLGDTEGLNLSFTALCNNGVLFPHQKKCSHMKVGDTASFNVTVSVSNCEKRSRNLIIKPVGLGDTLEILVSAECDCDCQREIETNSSKCHNGNGSFQCGVCTCNPGHMGPHCECGEDMVSTDSCKESPGHPSCSGRGDCYCGQCICHLSPYGSIYGPYCQCDNFSCLRHKGLLCGDNGDCDCGECVCRDGWTGEYCNCTTNRDSCTSEDGVLCSGRGDCVCGKCVCRNPGASGPTCERCPTCGDPCNSKRSCIECYLSADGQAQEECADKCKAIGATISEEDFSKDTSVSCSLQGENECLITFLITTDNEGKTIIHNINEKDCPKPPNIPMIMLGVSLAILLIGVVLLCIWKLLVSFHDRKEVAKFEAERSKAKWQTGTNPLYRGSTSTFKNVTYKHREKHKAGLSSDGGKPIPNPLLGLDST

SEQ ID NO: 16 - RNA, 2403 nt, unidentified
  source 1..2403: mol_type = unassigned RNA
  misc_difference 2: note = uracil or N1-methylpseudouracil
  misc_difference 8: note = uracil or N1-methylpseudouracil
  misc_difference 14: note = uracil or N1-methylpseudouracil
  misc_difference 17: note = uracil or N1-methylpseudouracil
  misc_difference 19: note = uracil or N1-methylpseudouracil
  misc_difference 23: note = uracil or N1-methylpseudouracil
  misc_difference 25: note = uracil or N1-methylpseudouracil
  misc_difference 26: note = uracil or N1-methylpseudouracil
  misc_difference 29: note = uracil or N1-methylpseudouracil
  misc_difference 32: note = uracil or N1-methylpseudouracil
  misc_difference 35: note = uracil or N1-methylpseudouracil
  misc_difference 37: note = uracil or N1-methylpseudouracil
  misc_difference 38: note = uracil or N1-methylpseudouracil
  misc_difference 56: note = uracil or N1-methylpseudouracil
  misc_difference 67: note = uracil or N1-methylpseudouracil
  misc_difference 73: note = uracil or N1-methylpseudouracil
  misc_difference 81: note = uracil or N1-methylpseudouracil
  misc_difference 91: note = uracil or N1-methylpseudouracil
  misc_difference 100: note = uracil or N1-methylpseudouracil
  misc_difference 104: note = uracil or N1-methylpseudouracil
  misc_difference 107: note = uracil or N1-methylpseudouracil
  misc_difference 117: note = uracil or N1-methylpseudouracil
  misc_difference 121: note = uracil or N1-methylpseudouracil
  misc_difference 123: note = uracil or N1-methylpseudouracil
  misc_difference 127: note = uracil or N1-methylpseudouracil
  misc_difference 130: note = uracil or N1-methylpseudouracil
  misc_difference 145: note = uracil or N1-methylpseudouracil
  misc_difference 146: note = uracil or N1-methylpseudouracil
  misc_difference 155: note = uracil or N1-methylpseudouracil
  misc_difference 159: note = uracil or N1-methylpseudouracil
  misc_difference 175: note = uracil or N1-methylpseudouracil
  misc_difference 186: note = uracil or N1-methylpseudouracil
  misc_difference 194: note = uracil or N1-methylpseudouracil
  misc_difference 197: note = uracil or N1-methylpseudouracil
  misc_difference 208: note = uracil or N1-methylpseudouracil
  misc_difference 215: note = uracil or N1-methylpseudouracil
  misc_difference 219: note = uracil or N1-methylpseudouracil
  misc_difference 220: note = uracil or N1-methylpseudouracil
  misc_difference 221: note = uracil or N1-methylpseudouracil
  misc_difference 224: note = uracil or N1-methylpseudouracil
  misc_difference 234: note = uracil or N1-methylpseudouracil
  misc_difference 236: note = uracil or N1-methylpseudouracil
  misc_difference 245: note = uracil or N1-methylpseudouracil
  misc_difference 251: note = uracil or N1-methylpseudouracil
  misc_difference 254: note = uracil or N1-methylpseudouracil
  misc_difference 267: note = uracil or N1-methylpseudouracil
  misc_difference 269: note = uracil or N1-methylpseudouracil
  misc_difference 275: note = uracil or N1-methylpseudouracil
  misc_difference 302: note = uracil or N1-methylpseudouracil
  misc_difference 305: note = uracil or N1-methylpseudouracil
  misc_difference 311: note = uracil or N1-methylpseudouracil
  misc_difference 318: note = uracil or N1-methylpseudouracil
  misc_difference 322: note = uracil or N1-methylpseudouracil
  misc_difference 326: note = uracil or N1-methylpseudouracil
  misc_difference 327: note = uracil or N1-methylpseudouracil
  misc_difference 329: note = uracil or N1-methylpseudouracil
  misc_difference 332: note = uracil or N1-methylpseudouracil
  misc_difference 337: note = uracil or N1-methylpseudouracil
  misc_difference 338: note = uracil or N1-methylpseudouracil
  misc_difference 345: note = uracil or N1-methylpseudouracil
  misc_difference 362: note = uracil or N1-methylpseudouracil
  misc_difference 368: note = uracil or N1-methylpseudouracil
  misc_difference 374: note = uracil or N1-methylpseudouracil
  misc_difference 391: note = uracil or N1-methylpseudouracil
  misc_difference 396: note = uracil or N1-methylpseudouracil
  misc_difference 398: note = uracil or N1-methylpseudouracil
  misc_difference 404: note = uracil or N1-methylpseudouracil
  misc_difference 406: note = uracil or N1-methylpseudouracil
  misc_difference 409: note = uracil or N1-methylpseudouracil
  misc_difference 413: note = uracil or N1-methylpseudouracil
  misc_difference 416: note = uracil or N1-methylpseudouracil
  misc_difference 420: note = uracil or N1-methylpseudouracil
  misc_difference 422: note = uracil or N1-methylpseudouracil
  misc_difference 434: note = uracil or N1-methylpseudouracil
  misc_difference 446: note = uracil or N1-methylpseudouracil
  misc_difference 455: note = uracil or N1-methylpseudouracil
  misc_difference 464: note = uracil or N1-methylpseudouracil
  misc_difference 468: note = uracil or N1-methylpseudouracil
  misc_difference 476: note = uracil or N1-methylpseudouracil
  misc_difference 480: note = uracil or N1-methylpseudouracil
  misc_difference 488: note = uracil or N1-methylpseudouracil
  misc_difference 497: note = uracil or N1-methylpseudouracil
  misc_difference 508: note = uracil or N1-methylpseudouracil
  misc_difference 509: note = uracil or N1-methylpseudouracil
  misc_difference 515: note = uracil or N1-methylpseudouracil
  misc_difference 520: note = uracil or N1-methylpseudouracil
  misc_difference 521: note = uracil or N1-methylpseudouracil
  misc_difference 529: note = uracil or N1-methylpseudouracil
  misc_difference 530: note = uracil or N1-methylpseudouracil
  misc_difference 533: note = uracil or N1-methylpseudouracil
  misc_difference 543: note = uracil or N1-methylpseudouracil
  misc_difference 545: note = uracil or N1-methylpseudouracil
  misc_difference 546: note = uracil or N1-methylpseudouracil
  misc_difference 547: note = uracil or N1-methylpseudouracil
  misc_difference 552: note = uracil or N1-methylpseudouracil
  misc_difference 553: note = uracil or N1-methylpseudouracil
  misc_difference 554: note = uracil or N1-methylpseudouracil
  misc_difference 557: note = uracil or N1-methylpseudouracil
  misc_difference 570: note = uracil or N1-methylpseudouracil
  misc_difference 578: note = uracil or N1-methylpseudouracil
  misc_difference 588: note = uracil or N1-methylpseudouracil
  misc_difference 589: note = uracil or N1-methylpseudouracil
  misc_difference 599: note = uracil or N1-methylpseudouracil
  misc_difference 603: note = uracil or N1-methylpseudouracil
  misc_difference 604: note = uracil or N1-methylpseudouracil
  misc_difference 607: note = uracil or N1-methylpseudouracil
  misc_difference 608: note = uracil or N1-methylpseudouracil
  misc_difference 610: note = uracil or N1-methylpseudouracil
  misc_difference 614: note = uracil or N1-methylpseudouracil
  misc_difference 618: note = uracil or N1-methylpseudouracil
  misc_difference 622: note = uracil or N1-methylpseudouracil
  misc_difference 623: note = uracil or N1-methylpseudouracil
  misc_difference 628: note = uracil or N1-methylpseudouracil
  misc_difference 629: note = uracil or N1-methylpseudouracil
  misc_difference 638: note = uracil or N1-methylpseudouracil
  misc_difference 641: note = uracil or N1-methylpseudouracil
  misc_difference 645: note = uracil or N1-methylpseudouracil
  misc_difference 647: note = uracil or N1-methylpseudouracil
  misc_difference 667: note = uracil or N1-methylpseudouracil
  misc_difference 668: note = uracil or N1-methylpseudouracil
  misc_difference 677: note = uracil or N1-methylpseudouracil
  misc_difference 680: note = uracil or N1-methylpseudouracil
  misc_difference 695: note = uracil or N1-methylpseudouracil
  misc_difference 707: note = uracil or N1-methylpseudouracil
  misc_difference 708: note = uracil or N1-methylpseudouracil
  misc_difference 727: note = uracil or N1-methylpseudouracil
  misc_difference 728: note = uracil or N1-methylpseudouracil
  misc_difference 737: note = uracil or N1-methylpseudouracil
  misc_difference 740: note = uracil or N1-methylpseudouracil
  misc_difference 752: note = uracil or N1-methylpseudouracil
  misc_difference 754: note = uracil or N1-methylpseudouracil
  misc_difference 767: note = uracil or N1-methylpseudouracil
  misc_difference 772: note = uracil or N1-methylpseudouracil
  misc_difference 783: note = uracil or N1-methylpseudouracil
  misc_difference 788: note = uracil or N1-methylpseudouracil
  misc_difference 792: note = uracil or N1-methylpseudouracil
  misc_difference 793: note = uracil or N1-methylpseudouracil
  misc_difference 794: note = uracil or N1-methylpseudouracil
  misc_difference 796: note = uracil or N1-methylpseudouracil
  misc_difference 797: note = uracil or N1-methylpseudouracil
  misc_difference 800: note = uracil or N1-methylpseudouracil
  misc_difference 802: note = uracil or N1-methylpseudouracil
  misc_difference 803: note = uracil or N1-methylpseudouracil
  misc_difference 806: note = uracil or N1-methylpseudouracil
  misc_difference 810: note = uracil or N1-methylpseudouracil
  misc_difference 826: note = uracil or N1-methylpseudouracil
  misc_difference 827: note = uracil or N1-methylpseudouracil
  misc_difference 833: note = uracil or N1-methylpseudouracil
  misc_difference 838: note = uracil or N1-methylpseudouracil
  misc_difference 845: note = uracil or N1-methylpseudouracil
  misc_difference 846: note = uracil or N1-methylpseudouracil
  misc_difference 854: note = uracil or N1-methylpseudouracil
  misc_difference 857: note = uracil or N1-methylpseudouracil
  misc_difference 860: note = uracil or N1-methylpseudouracil
  misc_difference 864: note = uracil or N1-methylpseudouracil
  misc_difference 875: note = uracil or N1-methylpseudouracil
  misc_difference 877: note = uracil or N1-methylpseudouracil
  misc_difference 884: note = uracil or N1-methylpseudouracil
  misc_difference 901: note = uracil or N1-methylpseudouracil
  misc_difference 908: note = uracil or N1-methylpseudouracil
  misc_difference 917: note = uracil or N1-methylpseudouracil
  misc_difference 920: note = uracil or N1-methylpseudouracil
  misc_difference 925: note = uracil or N1-methylpseudouracil
  misc_difference 930: note = uracil or N1-methylpseudouracil
  misc_difference 935: note = uracil or N1-methylpseudouracil
  misc_difference 944: note = uracil or N1-methylpseudouracil
  misc_difference 947: note = uracil or N1-methylpseudouracil
  misc_difference 956: note = uracil or N1-methylpseudouracil
  misc_difference 959: note = uracil or N1-methylpseudouracil
  misc_difference 966: note = uracil or N1-methylpseudouracil
  misc_difference 971: note = uracil or N1-methylpseudouracil
  misc_difference 974: note = uracil or N1-methylpseudouracil
  misc_difference 977: note = uracil or N1-methylpseudouracil
  misc_difference 980: note = uracil or N1-methylpseudouracil
  misc_difference 982: note = uracil or N1-methylpseudouracil
  misc_difference 983: note = uracil or N1-methylpseudouracil
  misc_difference 989: note = uracil or N1-methylpseudouracil
  misc_difference 1004: note = uracil or N1-methylpseudouracil
  misc_difference 1005: note = uracil or N1-methylpseudouracil
  misc_difference 1010: note = uracil or N1-methylpseudouracil
  misc_difference 1012: note = uracil or N1-methylpseudouracil
  misc_difference 1021: note = uracil or N1-methylpseudouracil
  misc_difference 1031: note = uracil or N1-methylpseudouracil
  misc_difference 1034: note = uracil or N1-methylpseudouracil
  misc_difference 1038: note = uracil or N1-methylpseudouracil
  misc_difference 1049: note = uracil or N1-methylpseudouracil
  misc_difference 1055: note = uracil or N1-methylpseudouracil
  misc_difference 1058: note = uracil or N1-methylpseudouracil
  misc_difference 1079: note = uracil or N1-methylpseudouracil
  misc_difference 1082: note = uracil or N1-methylpseudouracil
  misc_difference 1088: note = uracil or N1-methylpseudouracil
  misc_difference 1091: note = uracil or N1-methylpseudouracil
  misc_difference 1094: note = uracil or N1-methylpseudouracil
  misc_difference 1096: note = uracil or N1-methylpseudouracil
  misc_difference 1098: note = uracil or N1-methylpseudouracil
  misc_difference 1101: note = uracil or N1-methylpseudouracil
  misc_difference 1102: note = uracil or N1-methylpseudouracil
  misc_difference 1112: note = uracil or N1-methylpseudouracil
  misc_difference 1124: note = uracil or N1-methylpseudouracil
  misc_difference 1130: note = uracil or N1-methylpseudouracil
  misc_difference 1136: note = uracil or N1-methylpseudouracil
  misc_difference 1139: note = uracil or N1-methylpseudouracil
  misc_difference 1157: note = uracil or N1-methylpseudouracil
  misc_difference 1163: note = uracil or N1-methylpseudouracil
  misc_difference 1168: note = uracil or N1-methylpseudouracil
  misc_difference 1169: note = uracil or N1-methylpseudouracil
  misc_difference 1178: note = uracil or N1-methylpseudouracil
  misc_difference 1180: note = uracil or N1-methylpseudouracil
  misc_difference 1193: note = uracil or N1-methylpseudouracil
  misc_difference 1196: note = uracil or N1-methylpseudouracil
  misc_difference 1198: note = uracil or N1-methylpseudouracil
  misc_difference 1199: note = uracil or N1-methylpseudouracil
  misc_difference 1203: note = uracil or N1-methylpseudouracil
  misc_difference 1216: note = uracil or N1-methylpseudouracil
  misc_difference 1218: note = uracil or N1-methylpseudouracil
  misc_difference 1221: note = uracil or N1-methylpseudouracil
  misc_difference 1226: note = uracil or N1-methylpseudouracil
  misc_difference 1232: note = uracil or N1-methylpseudouracil
  misc_difference 1233: note = uracil or N1-methylpseudouracil
  misc_difference 1239: note = uracil or N1-methylpseudouracil
  misc_difference 1249: note = uracil or N1-methylpseudouracil
  misc_difference 1250: note = uracil or N1-methylpseudouracil
  misc_difference 1256: note = uracil or N1-methylpseudouracil
  misc_difference 1262: note = uracil or N1-methylpseudouracil
  misc_difference 1268: note = uracil or N1-methylpseudouracil
  misc_difference 1276: note = uracil or N1-methylpseudouracil
  misc_difference 1298: note = uracil or N1-methylpseudouracil
  misc_difference 1299: note = uracil or N1-methylpseudouracil
  misc_difference 1301: note = uracil or N1-methylpseudouracil
  misc_difference 1304: note = uracil or N1-methylpseudouracil
  misc_difference 1313: note = uracil or N1-methylpseudouracil
  misc_difference 1314: note = uracil or N1-methylpseudouracil
  misc_difference 1317: note = uracil or N1-methylpseudouracil
  misc_difference 1319: note = uracil or N1-methylpseudouracil
  misc_difference 1331: note = uracil or N1-methylpseudouracil
  misc_difference 1337: note = uracil or N1-methylpseudouracil
  misc_difference 1340: note = uracil or N1-methylpseudouracil
  misc_difference 1343: note = uracil or N1-methylpseudouracil
  misc_difference 1354: note = uracil or N1-methylpseudouracil
  misc_difference 1360: note = uracil or N1-methylpseudouracil
  misc_difference 1365: note = uracil or N1-methylpseudouracil
  misc_difference 1366: note = uracil or N1-methylpseudouracil
  misc_difference 1368: note = uracil or N1-methylpseudouracil
  misc_difference 1379: note = uracil or N1-methylpseudouracil
  misc_difference 1389: note = uracil or N1-methylpseudouracil
  misc_difference 1390: note = uracil or N1-methylpseudouracil
  misc_difference 1393: note = uracil or N1-methylpseudouracil
  misc_difference 1395: note = uracil or N1-methylpseudouracil
  misc_difference 1399: note = uracil or N1-methylpseudouracil
  misc_difference 1417: note = uracil or N1-methylpseudouracil
  misc_difference 1419: note = uracil or N1-methylpseudouracil
  misc_difference 1420: note = uracil or N1-methylpseudouracil
  misc_difference 1421: note = uracil or N1-methylpseudouracil
  misc_difference 1426: note = uracil or N1-methylpseudouracil
  misc_difference 1433: note = uracil or N1-methylpseudouracil
  misc_difference 1435: note = uracil or N1-methylpseudouracil
  misc_difference 1441: note = uracil or N1-methylpseudouracil
  misc_difference 1449: note = uracil or N1-methylpseudouracil
  misc_difference 1457: note = uracil or N1-methylpseudouracil
  misc_difference 1468: note = uracil or N1-methylpseudouracil
  misc_difference 1474: note = uracil or N1-methylpseudouracil
  misc_difference 1487: note = uracil or N1-methylpseudouracil
  misc_difference 1490: note = uracil or N1-methylpseudouracil
  misc_difference 1492: note = uracil or N1-methylpseudouracil
  misc_difference 1504: note = uracil or N1-methylpseudouracil
  misc_difference 1506: note = uracil or N1-methylpseudouracil
  misc_difference 1524: note = uracil or N1-methylpseudouracil
  misc_difference 1527: note = uracil or N1-methylpseudouracil
  misc_difference 1528: note = uracil or N1-methylpseudouracil
  misc_difference 1530: note = uracil or N1-methylpseudouracil
  misc_difference 1531: note = uracil or N1-methylpseudouracil
  misc_difference 1534: note = uracil or N1-methylpseudouracil
  misc_difference 1549: note = uracil or N1-methylpseudouracil
  misc_difference 1552: note = uracil or N1-methylpseudouracil
  misc_difference 1555: note = uracil or N1-methylpseudouracil
  misc_difference 1564: note = uracil or N1-methylpseudouracil
  misc_difference 1568: note = uracil or N1-methylpseudouracil
  misc_difference 1570: note = uracil or N1-methylpseudouracil
  misc_difference 1575: note = uracil or N1-methylpseudouracil
  misc_difference 1577: note = uracil or N1-methylpseudouracil
  misc_difference 1579: note = uracil or N1-methylpseudouracil
  misc_difference 1584: note = uracil or N1-methylpseudouracil
  misc_difference 1585: note = uracil or N1-methylpseudouracil
  misc_difference 1595: note = uracil or N1-methylpseudouracil
  misc_difference 1597: note = uracil or N1-methylpseudouracil
  misc_difference 1605: note = uracil or N1-methylpseudouracil
  misc_difference 1606: note = uracil or N1-methylpseudouracil
  misc_difference 1609: note = uracil or N1-methylpseudouracil
  misc_difference 1615: note = uracil or N1-methylpseudouracil
  misc_difference 1620: note = uracil or N1-methylpseudouracil
  misc_difference 1624: note = uracil or N1-methylpseudouracil
  misc_difference 1625: note = uracil or N1-methylpseudouracil
  misc_difference 1627: note = uracil or N1-methylpseudouracil
  misc_difference 1630: note = uracil or N1-methylpseudouracil
  misc_difference 1634: note = uracil or N1-methylpseudouracil
  misc_difference 1649: note = uracil or N1-methylpseudouracil
  misc_difference 1652: note = uracil or N1-methylpseudouracil
  misc_difference 1654: note = uracil or N1-methylpseudouracil
  misc_difference 1672: note = uracil or N1-methylpseudouracil
  misc_difference 1674: note = uracil or N1-methylpseudouracil
  misc_difference 1677: note = uracil or N1-methylpseudouracil
  misc_difference 1678: note = uracil or N1-methylpseudouracil
  misc_difference 1680: note = uracil or N1-methylpseudouracil
  misc_difference 1683: note = uracil or N1-methylpseudouracil
  misc_difference 1687: note = uracil or N1-methylpseudouracil
  misc_difference 1689: note = uracil or N1-methylpseudouracil
  misc_difference 1691: note = uracil or N1-methylpseudouracil
  misc_difference 1693: note = uracil or N1-methylpseudouracil
  misc_difference 1705: note = uracil or N1-methylpseudouracil
  misc_difference 1717: note = uracil or N1-methylpseudouracil
  misc_difference 1720: note = uracil or N1-methylpseudouracil
  misc_difference 1726: note = uracil or N1-methylpseudouracil
  misc_difference 1743: note = uracil or N1-methylpseudouracil
  misc_difference 1747: note = uracil or N1-methylpseudouracil
  misc_difference 1749: note = uracil or N1-methylpseudouracil
  misc_difference 1764: note = uracil or N1-methylpseudouracil
  misc_difference 1766: note = uracil or N1-methylpseudouracil
  misc_difference 1769: note = uracil or N1-methylpseudouracil
  misc_difference 1771: note = uracil or N1-methylpseudouracil
  misc_difference 1773: note = uracil or N1-methylpseudouracil
  misc_difference 1774: note = uracil or N1-methylpseudouracil
  misc_difference 1785: note = uracil or N1-methylpseudouracil
  misc_difference 1788: note = uracil or N1-methylpseudouracil
  misc_difference 1789: note = uracil or N1-methylpseudouracil
  misc_difference 1793: note = uracil or N1-methylpseudouracil
  misc_difference 1794: note = uracil or N1-methylpseudouracil
  misc_difference 1795: note = uracil or N1-methylpseudouracil
  misc_difference 1797: note = uracil or N1-methylpseudouracil
  misc_difference 1804: note = uracil or N1-methylpseudouracil
  misc_difference 1806: note = uracil or N1-methylpseudouracil
  misc_difference 1808: note = uracil or N1-methylpseudouracil
  misc_difference 1809: note = uracil or N1-methylpseudouracil
  misc_difference 1810: note = uracil or N1-methylpseudouracil
  misc_difference 1815: note = uracil or N1-methylpseudouracil
  misc_difference 1836: note = uracil or N1-methylpseudouracil
  misc_difference 1840: note = uracil or N1-methylpseudouracil
  misc_difference 1849: note = uracil or N1-methylpseudouracil
  misc_difference 1858: note = uracil or N1-methylpseudouracil
  misc_difference 1860: note = uracil or N1-methylpseudouracil
  misc_difference 1866: note = uracil or N1-methylpseudouracil
  misc_difference 1870: note = uracil or N1-methylpseudouracil
  misc_difference 1872: note = uracil or N1-methylpseudouracil
  misc_difference 1887: note = uracil or N1-methylpseudouracil
  misc_difference 1888: note = uracil or N1-methylpseudouracil
  misc_difference 1892: note = uracil or N1-methylpseudouracil
  misc_difference 1897: note = uracil or N1-methylpseudouracil
  misc_difference 1900: note = uracil or N1-methylpseudouracil
  misc_difference 1902: note = uracil or N1-methylpseudouracil
  misc_difference 1904: note = uracil or N1-methylpseudouracil
  misc_difference 1906: note = uracil or N1-methylpseudouracil
  misc_difference 1933: note = uracil or N1-methylpseudouracil
  misc_difference 1945: note = uracil or N1-methylpseudouracil
  misc_difference 1955: note = uracil or N1-methylpseudouracil
  misc_difference 1962: note = uracil or N1-methylpseudouracil
  misc_difference 1965: note = uracil or N1-methylpseudouracil
  misc_difference 1967: note = uracil or N1-methylpseudouracil
  misc_difference 1968: note = uracil or N1-methylpseudouracil
  misc_difference 1969: note = uracil or N1-methylpseudouracil
  misc_difference 1981: note = uracil or N1-methylpseudouracil
  misc_difference 1982: note = uracil or N1-methylpseudouracil
  misc_difference 2000: note = uracil or N1-methylpseudouracil
  misc_difference 2001: note = uracil or N1-methylpseudouracil
  misc_difference 2005: note = uracil or N1-methylpseudouracil
  misc_difference 2007: note = uracil or N1-methylpseudouracil
  misc_difference 2008: note = uracil or N1-methylpseudouracil
  misc_difference 2012: note = uracil or N1-methylpseudouracil
  misc_difference 2019: note = uracil or N1-methylpseudouracil
  misc_difference 2029: note = uracil or N1-methylpseudouracil
  misc_difference 2033: note = uracil or N1-methylpseudouracil
  misc_difference 2036: note = uracil or N1-methylpseudouracil
  misc_difference 2041: note = uracil or N1-methylpseudouracil
  misc_difference 2042: note = uracil or N1-methylpseudouracil
  misc_difference 2045: note = uracil or N1-methylpseudouracil
  misc_difference 2048: note = uracil or N1-methylpseudouracil
  misc_difference 2075: note = uracil or N1-methylpseudouracil
  misc_difference 2078: note = uracil or N1-methylpseudouracil
  misc_difference 2087: note = uracil or N1-methylpseudouracil
  misc_difference 2101: note = uracil or N1-methylpseudouracil
  misc_difference 2106: note = uracil or N1-methylpseudouracil
  misc_difference 2112: note = uracil or N1-methylpseudouracil
  misc_difference 2115: note = uracil or N1-methylpseudouracil
  misc_difference 2120: note = uracil or N1-methylpseudouracil
  misc_difference 2124: note = uracil or N1-methylpseudouracil
  misc_difference 2126: note = uracil or N1-methylpseudouracil
  misc_difference 2129: note = uracil or N1-methylpseudouracil
  misc_difference 2132: note = uracil or N1-methylpseudouracil
  misc_difference 2135: note = uracil or N1-methylpseudouracil
  misc_difference 2141: note = uracil or N1-methylpseudouracil
  misc_difference 2147: note = uracil or N1-methylpseudouracil
  misc_difference 2153: note = uracil or N1-methylpseudouracil
  misc_difference 2156: note = uracil or N1-methylpseudouracil
  misc_difference 2159: note = uracil or N1-methylpseudouracil
  misc_difference 2160: note = uracil or N1-methylpseudouracil
  misc_difference 2162: note = uracil or N1-methylpseudouracil
  misc_difference 2168: note = uracil or N1-methylpseudouracil
  misc_difference 2171: note = uracil or N1-methylpseudouracil
  misc_difference 2172: note = uracil or N1-methylpseudouracil
  misc_difference 2174: note = uracil or N1-methylpseudouracil
  misc_difference 2177: note = uracil or N1-methylpseudouracil
  misc_difference 2179: note = uracil or N1-methylpseudouracil
  misc_difference 2183: note = uracil or N1-methylpseudouracil
  misc_difference 2184: note = uracil or N1-methylpseudouracil
  misc_difference 2185: note = uracil or N1-methylpseudouracil
  misc_difference 2191: note = uracil or N1-methylpseudouracil
  misc_difference 2192: note = uracil or N1-methylpseudouracil
  misc_difference 2194: note = uracil or N1-methylpseudouracil
  misc_difference 2195: note = uracil or N1-methylpseudouracil
  misc_difference 2198: note = uracil or N1-methylpseudouracil
  misc_difference 2202: note = uracil or N1-methylpseudouracil
  misc_difference 2203: note = uracil or N1-methylpseudouracil
  misc_difference 2204: note = uracil or N1-methylpseudouracil
  misc_difference 2222: note = uracil or N1-methylpseudouracil
  misc_difference 2230: note = uracil or N1-methylpseudouracil
  misc_difference 2231: note = uracil or N1-methylpseudouracil
  misc_difference 2245: note = uracil or N1-methylpseudouracil
  misc_difference 2257: note = uracil or N1-methylpseudouracil
  misc_difference 2279: note = uracil or N1-methylpseudouracil
  misc_difference 2281: note = uracil or N1-methylpseudouracil
  misc_difference 2302: note = uracil or N1-methylpseudouracil
  misc_difference 2303: note = uracil or N1-methylpseudouracil
  misc_difference 2312: note = uracil or N1-methylpseudouracil
  misc_difference 2317: note = uracil or N1-methylpseudouracil
  misc_difference 2348: note = uracil or N1-methylpseudouracil
  misc_difference 2350: note = uracil or N1-methylpseudouracil
  misc_difference 2353: note = uracil or N1-methylpseudouracil
  misc_difference 2355: note = uracil or N1-methylpseudouracil
  misc_difference 2370: note = uracil or N1-methylpseudouracil
  misc_difference 2372: note = uracil or N1-methylpseudouracil
  misc_difference 2379: note = uracil or N1-methylpseudouracil
  misc_difference 2384: note = uracil or N1-methylpseudouracil
  misc_difference 2387: note = uracil or N1-methylpseudouracil
  misc_difference 2393: note = uracil or N1-methylpseudouracil
  misc_difference 2397: note = uracil or N1-methylpseudouracil
  misc_difference 2400: note = uracil or N1-methylpseudouracil
angggcancgagcnggngngccngnnccngcnacncnnaggcagaaacgaccacgngcaaggcggcngcgccnggggaggngccgagagcngcagcgacngccngcngaccggcccncacngngcgnggngcagccaggagaacnncacccaccngagnggcgccggcgagcgangcgacaccccngccaaccngcnggccaagggcngccagcngccnnncancgagaacccngngagcagaancgaggngcngcagaacaagccncngagcgngggcagacagaagaacagcagcgacancgngcagancgccccncagncacnngnacngaagnngcggccnggcagagagcagacccngcaggngcaggngagacagaccgaggacnacccngnggaccngnacnaccnganggancngagcgccagcanggacgacgaccngaacaccancaaggaacngggnagcagacnggcnaaggagangagcaagcngaccagcaacnncagacngggcnncggcagcnncgnggagaagccngnnncaccnnncangaagaccaccccngaggagancaccaacccnngcagcagcancccnnacnncngccngccnaccnncggcnncaagcacanccngccncngaccgacgacgcggagaganncaacgagancgngagaaagcagaagancagcgccaacanngacaccccggaaggcgganncgacgccancangcaggccgccgngngcaaggagaagancggcnggagaaacganagccngcannngnnagngnncgngagngacgcagacagccacnncggcanggacnccaagcnngccggcancgngancccnaacgacggccngngccaccnggaccacaggaacgagnacagcangagcaccgngcnggagnacccnaccancggccagcngancgacaagcnggnccagaanaacgngcngcngancnncgccgngacccaggaacaggnncaccngnacgagaacnacgccaagcngancccnggcgccaccgngggccnccngcagaaggacagcggcaacanccnccaacngancanancngcnnacgaggagcngagaagcgaggnggagcnggaggngcncggcgacaccgagggccngaaccngagcnncaccgcccngngcaacaacggcgngcngnncccncaccagaagaagngnagncacangaaggnnggcganaccgccagcnncaacgngaccgngagcgngagcaacngcgagaagagaagcagaaaccnnanaanaaagccagnnggncngggcgacacacnggaganccnggngagcgccgagngcgacngcganngncagagagagancgagacaaanncgncnaagngccacaacggcaacggancnnnccagngcggcgngngcaccngcaacccnggccacangggaccacacngcgagngcggagaggacanggngncaaccgacagcngnaaggagagcccaggccanccnncnngcnccggcagaggcgacngcnacngcggccagngcancngccancncnccccnnacggcagcancnacggcccnnacngccagngcganaacnncncgngccngagacacaagggccngcncngcggcgacaacggcgacngnganngnggngagngngngngcagagacggcnggaccggcgagnacngcaacngcaccaccaacagaganagcngnaccagcgaggacggngnccncngnnccggacggggnganngcgnnngnggcaagngngnnngccgnaacccaggagccagcggcccnaccngcgaaaggngcccgaccngnggaganccgngnaacagcaagcgaagnngcancgagngcnancncnccgcagacggccaggcccaggaggagngcgccgacaagngcaaggccancggcgcnacnannncggaagaggacnncagcaaggacaccagcgnnagcngnncgcngcagggngagaacgagngccngancaccnnccncancacgaccgacaacgagggcaagaccancanccacaacancaacgagaaggacngcccnaagccnccnaacancccnangancangcngggagngagccnggccanacngcnnancggcgnggnncngcngngcannnggaagnnannagngagnnnccacgacagaaaggaggnggccaagnncgaggccgagaggnccaaggccaagnggcagaccggcacgaacccacngnacagaggcagcaccagcaccnncaagaacgncacanacaagcaccgggagaagcacaaggccggccngncancngacggcggcaagccnancccgaanccacnccnaggacngganagnacc

SEQ ID NO: 17 - protein, 788 aa, unidentified
MGIELLCLFFLFLGRNDHVQGGCALGGAETCEDCLLIGPQCAWCAQENFTHPSGVGERCDTPANLLAKGCQLNFIENPVSQVEILKNKPLSVGRQKNSSDIVQIAPQSLILKLRPGGAQTLQVHVRQTEDYPVDLYYLMDLSASMDDDLNTIKELGSRLSKEMSKLTSNFRLGFGSFVEKPVSPFVKTTPEEIANPCSSIPYFCLPTFGFKHILPLTNDAERFNEIVKNQKISANIDTPEGGFDAIMQAAVCKEKIGWRNDSLHLLVFVSDADSHFGMDSKLAGIVIPNDGLCHLDSKNEYSMSTVLEYPTIGQLIDKLVQNNVLLIFAVTQEQVHLYENYAKLIPGATVGLLQKDSGNILQLIISAYEELRSEVELEVLGDTEGLNLSFTAICNNGTLFQHQKKCSHMKVGDTASFSVTVNIPHCERRSRHIIIKPVGLGDALELLVSPECNCDCQKEVEVNSSKCHHGNGSFQCGVCACHPGHMGPRCECGEDMLSTDSCKEAPDHPSCSGRGDCYCGQCICHLSPYGNIYGPYCQCDNFSCVRHKGLLCGGNGDCDCGECVCRSGWTGEYCNCTTSTDSCVSEDGVLCSGRGDCVCGKCVCTNPGASGPTCERCPTCGDPCNSKRSCIECHLSAAGQAREECVDKCKLAGATISEEEDFSKDGSVSCSLQGENECLITFLITTDNEGKTIIHSINEKDCPKPPNIPMIMLGVSLAILLIGVVLLCIWKLLVSFHDRKEVAKFEAERSKAKWQTGTNPLYRGSTSTFKNVTYKHREKQKVDLSTDC

SEQ ID NO: 18 - RNA, 2364 nt, unidentified
  source 1..2364: mol_type = unassigned RNA
  misc_difference 2: note = uracil or N1-methylpseudouracil
  misc_difference 6: note = uracil or N1-methylpseudouracil
  misc_difference 8: note = uracil or N1-methylpseudouracil
  misc_difference 14: note = uracil or N1-methylpseudouracil
  misc_difference 17: note = uracil or N1-methylpseudouracil
  misc_difference 19: note = uracil or N1-methylpseudouracil
  misc_difference 21: note = uracil or N1-methylpseudouracil
  misc_difference 23: note = uracil or N1-methylpseudouracil
  misc_difference 25: note = uracil or N1-methylpseudouracil
  misc_difference 26: note = uracil or N1-methylpseudouracil
  misc_difference 28: note = uracil or N1-methylpseudouracil
  misc_difference 29: note = uracil or N1-methylpseudouracil
  misc_difference 30: note = uracil or N1-methylpseudouracil
  misc_difference 32: note = uracil or N1-methylpseudouracil
  misc_difference 34: note = uracil or N1-methylpseudouracil
  misc_difference 35: note = uracil or N1-methylpseudouracil
  misc_difference 36: note = uracil or N1-methylpseudouracil
  misc_difference 38: note = uracil or N1-methylpseudouracil
  misc_difference 56: note = uracil or N1-methylpseudouracil
  misc_difference 67: note = uracil or N1-methylpseudouracil
  misc_difference 74: note = uracil or N1-methylpseudouracil
  misc_difference 91: note = uracil or N1-methylpseudouracil
  misc_difference 100: note = uracil or N1-methylpseudouracil
  misc_difference 104: note = uracil or N1-methylpseudouracil
  misc_difference 107: note = uracil or N1-methylpseudouracil
  misc_difference 110: note = uracil or N1-methylpseudouracil
  misc_difference 121: note = uracil or N1-methylpseudouracil
  misc_difference 123: note = uracil or N1-methylpseudouracil
  misc_difference 127: note = uracil or N1-methylpseudouracil
  misc_difference 130: note = uracil or N1-methylpseudouracil
  misc_difference 132: note = uracil or N1-methylpseudouracil
  misc_difference 145: note = uracil or N1-methylpseudouracil
  misc_difference 146: note = uracil or N1-methylpseudouracil
  misc_difference 164: note = uracil or N1-methylpseudouracil
  misc_difference 175: note = uracil or N1-methylpseudouracil
  misc_difference 186: note = uracil or N1-methylpseudouracil
  misc_difference 192: note = uracil or N1-methylpseudouracil
  misc_difference 194: note = uracil or N1-methylpseudouracil
  misc_difference 197: note = uracil or N1-methylpseudouracil
  misc_difference 208: note = uracil or N1-methylpseudouracil
  misc_difference 215: note = uracil or N1-methylpseudouracil
  misc_difference 219: note = uracil or N1-methylpseudouracil
  misc_difference 220: note = uracil or N1-methylpseudouracil
  misc_difference 221: note = uracil or N1-methylpseudouracil
  misc_difference 224: note = uracil or N1-methylpseudouracil
  misc_difference 231: note = uracil or N1-methylpseudouracil
  misc_difference 236: note = uracil or N1-methylpseudouracil
  misc_difference 245: note = uracil or N1-methylpseudouracil
  misc_difference 251: note = uracil or N1-methylpseudouracil
  misc_difference 252: note = uracil or N1-methylpseudouracil
  misc_difference 254: note = uracil or N1-methylpseudouracil
  misc_difference 267: note = uracil or N1-methylpseudouracil
  misc_difference 269: note = uracil or N1-methylpseudouracil
  misc_difference 275: note = uracil or N1-methylpseudouracil
  misc_difference 292: note = uracil or N1-methylpseudouracil
  misc_difference 294: note = uracil or N1-methylpseudouracil
  misc_difference 295: note = uracil or N1-methylpseudouracil
  misc_difference 297: note = uracil or N1-methylpseudouracil
  misc_difference 302: note = uracil or N1-methylpseudouracil
  misc_difference 305: note = uracil or N1-methylpseudouracil
  misc_difference 311: note = uracil or N1-methylpseudouracil
  misc_difference 318: note = uracil or N1-methylpseudouracil
  misc_difference 326: note = uracil or N1-methylpseudouracil
  misc_difference 329: note = uracil or N1-methylpseudouracil
  misc_difference 330: note = uracil or N1-methylpseudouracil
  misc_difference 332: note = uracil or N1-methylpseudouracil
  misc_difference 338: note = uracil or N1-methylpseudouracil
  misc_difference 354: note = uracil or N1-methylpseudouracil
  misc_difference 362: note = uracil or N1-methylpseudouracil
  misc_difference 368: note = uracil or N1-methylpseudouracil
  misc_difference 374: note = uracil or N1-methylpseudouracil
  misc_difference 384: note = uracil or N1-methylpseudouracil
  misc_difference 391: note = uracil or N1-methylpseudouracil
  misc_difference 398: note = uracil or N1-methylpseudouracil
  misc_difference 404: note = uracil or N1-methylpseudouracil
  misc_difference 406: note = uracil or N1-methylpseudouracil
  misc_difference 409: note = uracil or N1-methylpseudouracil
  misc_difference 413: note = uracil or N1-methylpseudouracil
  misc_difference 416: note = uracil or N1-methylpseudouracil
  misc_difference 420: note = uracil or N1-methylpseudouracil
  misc_difference 422: note = uracil or N1-methylpseudouracil
  misc_difference 424: note = uracil or N1-methylpseudouracil
  misc_difference 434: note = uracil or N1-methylpseudouracil
  misc_difference 444: note = uracil or N1-methylpseudouracil
  misc_difference 446: note = uracil or N1-methylpseudouracil
  misc_difference 455: note = uracil or N1-methylpseudouracil
  misc_difference 456: note = uracil or N1-methylpseudouracil
  misc_difference 464: note = uracil or N1-methylpseudouracil
  misc_difference 476: note = uracil or N1-methylpseudouracil
  misc_difference 478: note = uracil or N1-methylpseudouracil
  misc_difference 480: note = uracil or N1-methylpseudouracil
  misc_difference 488: note = uracil or N1-methylpseudouracil
  misc_difference 490: note = uracil or N1-methylpseudouracil
  misc_difference 497: note = uracil or N1-methylpseudouracil
  misc_difference 508: note = uracil or N1-methylpseudouracil
  misc_difference 509: note = uracil or N1-methylpseudouracil
  misc_difference 515: note = uracil or N1-methylpseudouracil
  misc_difference 520: note = uracil or N1-methylpseudouracil
  misc_difference 521: note = uracil or N1-methylpseudouracil
  misc_difference 529: note = uracil or N1-methylpseudouracil
  misc_difference 530: note = uracil or N1-methylpseudouracil
  misc_difference 531: note = uracil or N1-methylpseudouracil
  misc_difference 533: note = uracil or N1-methylpseudouracil
  misc_difference 543: note = uracil or N1-methylpseudouracil
  misc_difference 545: note = uracil or N1-methylpseudouracil
  misc_difference 547: note = uracil or N1-methylpseudouracil
  misc_difference 549: note = uracil or N1-methylpseudouracil
  misc_difference 552: note = uracil or N1-methylpseudouracil
  misc_difference 553: note = uracil or N1-methylpseudouracil
  misc_difference 554: note = uracil or N1-methylpseudouracil
  misc_difference 557: note = uracil or N1-methylpseudouracil
  misc_difference 578: note = uracil or N1-methylpseudouracil
  misc_difference 589: note = uracil or N1-methylpseudouracil
  misc_difference 591: note = uracil or N1-methylpseudouracil
  misc_difference 599: note = uracil or N1-methylpseudouracil
  misc_difference 604: note = uracil or N1-methylpseudouracil
  misc_difference 607: note = uracil or N1-methylpseudouracil
  misc_difference 608: note = uracil or N1-methylpseudouracil
  misc_difference 610: note = uracil or N1-methylpseudouracil
  misc_difference 614: note = uracil or N1-methylpseudouracil
  misc_difference 618: note = uracil or N1-methylpseudouracil
  misc_difference 622: note = uracil or N1-methylpseudouracil
  misc_difference 623: note = uracil or N1-methylpseudouracil
  misc_difference 628: note = uracil or N1-methylpseudouracil
  misc_difference 629: note = uracil or N1-methylpseudouracil
  misc_difference 638: note = uracil or N1-methylpseudouracil
  misc_difference 639: note = uracil or N1-methylpseudouracil
  misc_difference 641: note = uracil or N1-methylpseudouracil
  misc_difference 645: note = uracil or N1-methylpseudouracil
  misc_difference 647: note = uracil or N1-methylpseudouracil
  misc_difference 667: note = uracil or N1-methylpseudouracil
  misc_difference 668: note = uracil or N1-methylpseudouracil
  misc_difference 669: note = uracil or N1-methylpseudouracil
  misc_difference 677: note = uracil or N1-methylpseudouracil
  misc_difference 680: note = uracil or N1-methylpseudouracil
  misc_difference 687: note = uracil or N1-methylpseudouracil
  misc_difference 695: note = uracil or N1-methylpseudouracil
  misc_difference 707: note = uracil or N1-methylpseudouracil
  misc_difference 708: note = uracil or N1-methylpseudouracil
  misc_difference 711: note = uracil or N1-methylpseudouracil
  misc_difference 714: note = uracil or N1-methylpseudouracil
  misc_difference 717: note = uracil or N1-methylpseudouracil
  misc_difference 727: note = uracil or N1-methylpseudouracil
  misc_difference 728: note = uracil or N1-methylpseudouracil
  misc_difference 737: note = uracil or N1-methylpseudouracil
  misc_difference 740: note = uracil or N1-methylpseudouracil
  misc_difference 747: note = uracil or N1-methylpseudouracil
  misc_difference 752: note = uracil or N1-methylpseudouracil
  misc_difference 754: note = uracil or N1-methylpseudouracil
  misc_difference 767: note = uracil or N1-methylpseudouracil
  misc_difference 772: note = uracil or N1-methylpseudouracil
  misc_difference 788: note = uracil or N1-methylpseudouracil
  misc_difference 794: note = uracil or N1-methylpseudouracil
  misc_difference 797: note = uracil or N1-methylpseudouracil
  misc_difference 800: note = uracil or N1-methylpseudouracil
  misc_difference 802: note = uracil or N1-methylpseudouracil
  misc_difference 803: note = uracil or N1-methylpseudouracil
  misc_difference 806: note = uracil or N1-methylpseudouracil
  misc_difference 826: note = uracil or N1-methylpseudouracil
  misc_difference 827: note = uracil or N1-methylpseudouracil
  misc_difference 828: note = uracil or N1-methylpseudouracil
  misc_difference 833: note = uracil or N1-methylpseudouracil
  misc_difference 838: note = uracil or N1-methylpseudouracil
  misc_difference 845: note = uracil or N1-methylpseudouracil
  misc_difference 854: note = uracil or N1-methylpseudouracil
  misc_difference 857: note = uracil or N1-methylpseudouracil
  misc_difference 860: note = uracil or N1-methylpseudouracil
  misc_difference 875: note = uracil or N1-methylpseudouracil
  misc_difference 877: note = uracil or N1-methylpseudouracil
  misc_difference 879: note = uracil or N1-methylpseudouracil
  misc_difference 884: note = uracil or N1-methylpseudouracil
  misc_difference 888: note = uracil or N1-methylpseudouracil
  misc_difference 889: note = uracil or N1-methylpseudouracil
  misc_difference 901: note = uracil or N1-methylpseudouracil
  misc_difference 908: note = uracil or N1-methylpseudouracil
  misc_difference 917: note = uracil or N1-methylpseudouracil
  misc_difference 920: note = uracil or N1-methylpseudouracil
  misc_difference 925: note = uracil or N1-methylpseudouracil
  misc_difference 935: note = uracil or N1-methylpseudouracil
  misc_difference 936: note = uracil or N1-methylpseudouracil
  misc_difference 944: note = uracil or N1-methylpseudouracil
  misc_difference 947: note = uracil or N1-methylpseudouracil
  misc_difference 948: note = uracil or N1-methylpseudouracil
  misc_difference 951: note = uracil or N1-methylpseudouracil
  misc_difference 956: note = uracil or N1-methylpseudouracil
  misc_difference 959: note = uracil or N1-methylpseudouracil
  misc_difference 971: note = uracil or N1-methylpseudouracil
  misc_difference 974: note = uracil or N1-methylpseudouracil
  misc_difference 977: note = uracil or N1-methylpseudouracil
  misc_difference 980: note = uracil or N1-methylpseudouracil
  misc_difference 982: note = uracil or N1-methylpseudouracil
  misc_difference 983: note = uracil or N1-methylpseudouracil
  misc_difference 984: note = uracil or N1-methylpseudouracil
  misc_difference 989: note = uracil or N1-methylpseudouracil
  misc_difference 1004: note = uracil or N1-methylpseudouracil
  misc_difference 1010: note = uracil or N1-methylpseudouracil
  misc_difference 1012: note = uracil or N1-methylpseudouracil
  misc_difference 1020: note = uracil or N1-methylpseudouracil
  misc_difference 1021: note = uracil or N1-methylpseudouracil
  misc_difference 1031: note = uracil or N1-methylpseudouracil
  misc_difference 1034: note = uracil or N1-methylpseudouracil
  misc_difference 1047: note = uracil or N1-methylpseudouracil
  misc_difference 1049: note = uracil or N1-methylpseudouracil
  misc_difference 1055: note = uracil or N1-methylpseudouracil
  misc_difference 1058: note = uracil or N1-methylpseudouracil
  misc_difference 1069: note = uracil or N1-methylpseudouracil
  misc_difference 1079: note = uracil or N1-methylpseudouracil
  misc_difference 1082: note = uracil or N1-methylpseudouracil
  misc_difference 1088: note = uracil or N1-methylpseudouracil
  misc_difference 1091: note = uracil or N1-methylpseudouracil
  misc_difference 1094: note = uracil or N1-methylpseudouracil
  misc_difference 1096: note = uracil or N1-methylpseudouracil
  misc_difference 1102: note = uracil or N1-methylpseudouracil
  misc_difference 1112: note = uracil or N1-methylpseudouracil
  misc_difference 1124: note = uracil or N1-methylpseudouracil
  misc_difference 1130: note = uracil or N1-methylpseudouracil
  misc_difference 1136: note = uracil or N1-methylpseudouracil
  misc_difference 1139: note = uracil or N1-methylpseudouracil
  misc_difference 1157: note = uracil or N1-methylpseudouracil
  misc_difference 1163: note = uracil or N1-methylpseudouracil
  misc_difference 1168: note = uracil or N1-methylpseudouracil
  misc_difference 1169: note = uracil or N1-methylpseudouracil
  misc_difference 1170: note = uracil or N1-methylpseudouracil
  misc_difference 1178: note = uracil or N1-methylpseudouracil
  misc_difference 1180: note = uracil or N1-methylpseudouracil
  misc_difference 1194: note = uracil or N1-methylpseudouracil
  misc_difference 1196: note = uracil or N1-methylpseudouracil
  misc_difference 1198: note = uracil or N1-methylpseudouracil
  misc_difference 1199: note = uracil or N1-methylpseudouracil
  misc_difference 1216: note = uracil or N1-methylpseudouracil
  misc_difference 1219: note = uracil or N1-methylpseudouracil
  misc_difference 1221: note = uracil or N1-methylpseudouracil
  misc_difference 1226: note = uracil or N1-methylpseudouracil
  misc_difference 1232: note = uracil or N1-methylpseudouracil
  misc_difference 1246: note = uracil or N1-methylpseudouracil
  misc_difference 1249: note = uracil or N1-methylpseudouracil
  misc_difference 1250: note = uracil or N1-methylpseudouracil
  misc_difference 1256: note = uracil or N1-methylpseudouracil
  misc_difference 1262: note = uracil or N1-methylpseudouracil
  misc_difference 1268: note = uracil or N1-methylpseudouracil
  misc_difference 1272: note = uracil or N1-methylpseudouracil
  misc_difference 1276: note = uracil or N1-methylpseudouracil
  misc_difference 1278: note = uracil or N1-methylpseudouracil
  misc_difference 1298: note = uracil or N1-methylpseudouracil
  misc_difference 1301: note = uracil or N1-methylpseudouracil
  misc_difference 1304: note = uracil or N1-methylpseudouracil
  misc_difference 1313: note = uracil or N1-methylpseudouracil
  misc_difference 1319: note = uracil or N1-methylpseudouracil
  misc_difference 1331: note = uracil or N1-methylpseudouracil
  misc_difference 1337: note = uracil or N1-methylpseudouracil
  misc_difference 1340: note = uracil or N1-methylpseudouracil
  misc_difference 1343: note = uracil or N1-methylpseudouracil
  misc_difference 1345: note = uracil or N1-methylpseudouracil
  misc_difference 1350: note = uracil or N1-methylpseudouracil
  misc_difference 1354: note = uracil or N1-methylpseudouracil
  misc_difference 1356: note = uracil or N1-methylpseudouracil
  misc_difference 1360: note = uracil or N1-methylpseudouracil
  misc_difference 1366: note = uracil or N1-methylpseudouracil
  misc_difference 1379: note = uracil or N1-methylpseudouracil
  misc_difference 1385: note = uracil or N1-methylpseudouracil
  misc_difference 1393: note = uracil or N1-methylpseudouracil
  misc_difference 1395: note = uracil or N1-methylpseudouracil
  misc_difference 1399: note = uracil or N1-methylpseudouracil
  misc_difference 1420: note = uracil or N1-methylpseudouracil
  misc_difference 1421: note = uracil or N1-methylpseudouracil
  misc_difference 1426: note = uracil or N1-methylpseudouracil
  misc_difference 1433: note = uracil or N1-methylpseudouracil
  misc_difference 1435: note = uracil or N1-methylpseudouracil
  misc_difference 1441: note = uracil or N1-methylpseudouracil
  misc_difference 1457: note = uracil or N1-methylpseudouracil
  misc_difference 1464: note = uracil or N1-methylpseudouracil
  misc_difference 1468: note = uracil or N1-methylpseudouracil
  misc_difference 1474: note = uracil or N1-methylpseudouracil
  misc_difference 1487: note = uracil or N1-methylpseudouracil
  misc_difference 1490: note = uracil or N1-methylpseudouracil
  misc_difference 1492: note = uracil or N1-methylpseudouracil
  misc_difference 1494: note = uracil or N1-methylpseudouracil
  misc_difference 1504: note = uracil or N1-methylpseudouracil
  misc_difference 1518: note = uracil or N1-methylpseudouracil
  misc_difference 1527: note = uracil or N1-methylpseudouracil
  misc_difference 1531: note = uracil or N1-methylpseudouracil
  misc_difference 1534: note = uracil or N1-methylpseudouracil
  misc_difference 1536: note = uracil or N1-methylpseudouracil
  misc_difference 1549: note = uracil or N1-methylpseudouracil
  misc_difference 1552: note = uracil or N1-methylpseudouracil
  misc_difference 1555: note = uracil or N1-methylpseudouracil
  misc_difference 1564: note = uracil or N1-methylpseudouracil
  misc_difference 1568: note = uracil or N1-methylpseudouracil
  misc_difference 1570: note = uracil or N1-methylpseudouracil
  misc_difference 1577: note = uracil or N1-methylpseudouracil
  misc_difference 1579: note = uracil or N1-methylpseudouracil
  misc_difference 1584: note = uracil or N1-methylpseudouracil
  misc_difference 1585: note = uracil or N1-methylpseudouracil
  misc_difference 1595: note = uracil or N1-methylpseudouracil
  misc_difference 1596: note = uracil or N1-methylpseudouracil
  misc_difference 1597: note = uracil or N1-methylpseudouracil
  misc_difference 1606: note = uracil or N1-methylpseudouracil
  misc_difference 1609: note = uracil or N1-methylpseudouracil
  misc_difference 1615: note = uracil or N1-methylpseudouracil
  misc_difference 1617: note = uracil or N1-methylpseudouracil
  misc_difference 1620: note = uracil or N1-methylpseudouracil
  misc_difference 1624: note = uracil or N1-methylpseudouracil
  misc_difference 1625: note = uracil or N1-methylpseudouracil
  misc_difference 1626: note = uracil or N1-methylpseudouracil
  misc_difference 1627: note = uracil or N1-methylpseudouracil
  misc_difference 1630: note = uracil or N1-methylpseudouracil
  misc_difference 1634: note = uracil or N1-methylpseudouracil
  misc_difference 1649: note = uracil or N1-methylpseudouracil
  misc_difference 1652: note = uracil or N1-methylpseudouracil
  misc_difference 1654: note = uracil or N1-methylpseudouracil
  misc_difference 1665: note = uracil or N1-methylpseudouracil
  misc_difference 1672: note = uracil or N1-methylpseudouracil
  misc_difference 1678: note = uracil or N1-methylpseudouracil
  misc_difference 1687: note = uracil or N1-methylpseudouracil
  misc_difference 1691: note = uracil or N1-methylpseudouracil
  misc_difference 1693: note = uracil or N1-methylpseudouracil
  misc_difference 1695: note = uracil or N1-methylpseudouracil
  misc_difference 1705: note = uracil or N1-methylpseudouracil
  misc_difference 1717: note = uracil or N1-methylpseudouracil
  misc_difference 1720: note = uracil or N1-methylpseudouracil
  misc_difference 1726: note = uracil or N1-methylpseudouracil
  misc_difference 1731: note = uracil or N1-methylpseudouracil
  misc_difference 1734: note = uracil or N1-methylpseudouracil
  misc_difference 1735: note = uracil or N1-methylpseudouracil
  misc_difference 1740: note = uracil or N1-methylpseudouracil
  misc_difference 1747: note = uracil or N1-methylpseudouracil
  misc_difference 1749: note = uracil or N1-methylpseudouracil
  misc_difference 1751: note = uracil or N1-methylpseudouracil
  misc_difference 1766: note = uracil or N1-methylpseudouracil
  misc_difference 1769: note = uracil or N1-methylpseudouracil
  misc_difference 1771: note = uracil or N1-methylpseudouracil
  misc_difference 1773: note = uracil or N1-methylpseudouracil
  misc_difference 1774: note = uracil or N1-methylpseudouracil
  misc_difference 1776: note = uracil or N1-methylpseudouracil
  misc_difference 1789: note = uracil or N1-methylpseudouracil
  misc_difference 1793: note = uracil or N1-methylpseudouracil
  misc_difference 1795: note = uracil or N1-methylpseudouracil
  misc_difference 1804: note = uracil or N1-methylpseudouracil
  misc_difference 1808: note = uracil or N1-methylpseudouracil
  misc_difference 1810: note = uracil or N1-methylpseudouracil
  misc_difference 1815: note = uracil or N1-methylpseudouracil
  misc_difference 1818: note = uracil or N1-methylpseudouracil
  misc_difference 1828: note = uracil or N1-methylpseudouracil
  misc_difference 1840: note = uracil or N1-methylpseudouracil
  misc_difference 1849: note = uracil or N1-methylpseudouracil
  misc_difference 1851: note = uracil or N1-methylpseudouracil
  misc_difference 1858: note = uracil or N1-methylpseudouracil
  misc_difference 1869: note = uracil or N1-methylpseudouracil
  misc_difference 1870: note = uracil or N1-methylpseudouracil
  misc_difference 1885: note = uracil or N1-methylpseudouracil
  misc_difference 1888: note = uracil or N1-methylpseudouracil
  misc_difference 1892: note = uracil or N1-methylpseudouracil
  misc_difference 1897: note = uracil or N1-methylpseudouracil
  misc_difference 1904: note = uracil or N1-methylpseudouracil
  misc_difference 1906: note = uracil or N1-methylpseudouracil
  misc_difference 1933: note = uracil or N1-methylpseudouracil
  misc_difference 1937: note = uracil or N1-methylpseudouracil
  misc_difference 1941: note = uracil or N1-methylpseudouracil
  misc_difference 1945: note = uracil or N1-methylpseudouracil
  misc_difference 1947: note = uracil or N1-methylpseudouracil
  misc_difference 1952: note = uracil or N1-methylpseudouracil
  misc_difference 1962: note = uracil or N1-methylpseudouracil
  misc_difference 1967: note = uracil or N1-methylpseudouracil
  misc_difference 1968: note = uracil or N1-methylpseudouracil
  misc_difference 1984: note = uracil or N1-methylpseudouracil
  misc_difference 1985: note = uracil or N1-methylpseudouracil
  misc_difference 1987: note = uracil or N1-methylpseudouracil
  misc_difference 2003: note = uracil or N1-methylpseudouracil
  misc_difference 2008: note = uracil or N1-methylpseudouracil
  misc_difference 2011: note = uracil or N1-methylpseudouracil
  misc_difference 2015: note = uracil or N1-methylpseudouracil
  misc_difference 2032: note = uracil or N1-methylpseudouracil
  misc_difference 2036: note = uracil or N1-methylpseudouracil
  misc_difference 2039: note = uracil or N1-methylpseudouracil
  misc_difference 2043: note = uracil or N1-methylpseudouracil
  misc_difference 2044: note = uracil or N1-methylpseudouracil
  misc_difference 2045: note = uracil or N1-methylpseudouracil
  misc_difference 2048: note = uracil or N1-methylpseudouracil
  misc_difference 2051: note = uracil or N1-methylpseudouracil
  misc_difference 2058: note = uracil or N1-methylpseudouracil
  misc_difference 2061: note = uracil or N1-methylpseudouracil
  misc_difference 2078: note = uracil or N1-methylpseudouracil
  misc_difference 2081: note = uracil or N1-methylpseudouracil
  misc_difference 2082: note = uracil or N1-methylpseudouracil
  misc_difference 2086: note = uracil or N1-methylpseudouracil
  misc_difference 2088: note = uracil or N1-methylpseudouracil
  misc_difference 2090: note = uracil or N1-methylpseudouracil
  misc_difference 2103: note = uracil or N1-methylpseudouracil
  misc_difference 2104: note = uracil or N1-methylpseudouracil
  misc_difference 2106: note = uracil or N1-methylpseudouracil
  misc_difference 2123: note = uracil or N1-methylpseudouracil
  misc_difference 2124: note = uracil or N1-methylpseudouracil
  misc_difference 2129: note = uracil or N1-methylpseudouracil
  misc_difference 2132: note = uracil or N1-methylpseudouracil
  misc_difference 2135: note = uracil or N1-methylpseudouracil
  misc_difference 2138: note = uracil or N1-methylpseudouracil
  misc_difference 2144: note = uracil or N1-methylpseudouracil
  misc_difference 2146: note = uracil or N1-methylpseudouracil
  misc_difference 2150: note = uracil or N1-methylpseudouracil
  misc_difference 2156: note = uracil or N1-methylpseudouracil
  misc_difference 2159: note = uracil or N1-methylpseudouracil
  misc_difference 2162: note = uracil or N1-methylpseudouracil
  misc_difference 2165: note = uracil or N1-methylpseudouracil
  misc_difference 2171: note = uracil or N1-methylpseudouracil
  misc_difference 2174: note = uracil or N1-methylpseudouracil
  misc_difference 2177: note = uracil or N1-methylpseudouracil
  misc_difference 2180: note = uracil or N1-methylpseudouracil
  misc_difference 2182: note = uracil or N1-methylpseudouracil
  misc_difference 2186: note = uracil or N1-methylpseudouracil
  misc_difference 2188: note = uracil or N1-methylpseudouracil
  misc_difference 2195: note = uracil or N1-methylpseudouracil
  misc_difference 2198: note = uracil or N1-methylpseudouracil
  misc_difference 2201: note = uracil or N1-methylpseudouracil
  misc_difference 2203: note = uracil or N1-methylpseudouracil
  misc_difference 2206: note = uracil or N1-methylpseudouracil
  misc_difference 2207: note = uracil or N1-methylpseudouracil
  misc_difference 2225: note = uracil or N1-methylpseudouracil
  misc_difference 2233: note = uracil or N1-methylpseudouracil
  misc_difference 2234: note = uracil or N1-methylpseudouracil
  misc_difference 2235: note = uracil or N1-methylpseudouracil
  misc_difference 2248: note = uracil or N1-methylpseudouracil
  misc_difference 2250: note = uracil or N1-methylpseudouracil
  misc_difference 2260: note = uracil or N1-methylpseudouracil
  misc_difference 2277: note = uracil or N1-methylpseudouracil
  misc_difference 2280: note = uracil or N1-methylpseudouracil
  misc_difference 2282: note = uracil or N1-methylpseudouracil
  misc_difference 2284: note = uracil or N1-methylpseudouracil
  misc_difference 2293: note = uracil or N1-methylpseudouracil
  misc_difference 2295: note = uracil or N1-methylpseudouracil
  misc_difference 2298: note = uracil or N1-methylpseudouracil
  misc_difference 2299: note = uracil or N1-methylpseudouracil
  misc_difference 2301: note = uracil or N1-methylpseudouracil
  misc_difference 2305: note = uracil or N1-methylpseudouracil
  misc_difference 2306: note = uracil or N1-methylpseudouracil
  misc_difference 2315: note = uracil or N1-methylpseudouracil
  misc_difference 2319: note = uracil or N1-methylpseudouracil
  misc_difference 2320: note = uracil or N1-methylpseudouracil
  misc_difference 2345: note = uracil or N1-methylpseudouracil
  misc_difference 2351: note = uracil or N1-methylpseudouracil
  misc_difference 2353: note = uracil or N1-methylpseudouracil
  misc_difference 2361: note = uracil or N1-methylpseudouracil
  misc_difference 2362: note = uracil or N1-methylpseudouracil
angggnancgagcngcngngncngnncnnncngnnncngggccgcaacgaccacgnccagggcggcngcgcccngggcggggccgagaccngcgaggacngccngcncancgggccacagngngccnggngngcacaggagaacnncacccaccccagcggggngggcgagaggngcgacaccccngcaaancngcnggcaaagggcngccagcngaannncancgagaancccgncagccaggnggaganncncaagaacaagccncngagcgncggacggcagaagaacncnncngacancgnccagancgcaccncagagccnganncngaagcnccgcccaggcggagcncagacccnccaggnccacgncaggcagacngaggacnaccccgnggaccngnacnaccnganggancngnccgccagcanggacgacgancngaacaccannaaggagcngggcagccggcncncnaaggagangnccaagcncaccagcaacnncaggcnggganncggcagcnnngncgagaagccngngncnccnnncgngaagaccacaccagaggagancgcaaaccccngnagcagcanccccnacnncngccngccnacanncgggnncaagcacanncngccncngaccaacgacgcagagcgcnnnaacgagancgngaagaancagaagancagcgccaacannganacnccngagggcggcnncgacgccancangcaggcngccgncngcaaggagaagancgggnggaggaacgacagccnccaccngcncgngnncgngagcgacgccgacagccacnnnggganggacnccaagcnggccggcancgnganccccaacgacgggcngngncaccncgannccaagaacgagnacagcangagcaccgngcnggagnaccccaccanngggcagcncannganaagcncgngcagaacaacgnccngcngancnnngcagngacacaggagcaggngcaccngnacgagaannacgcaaagcncanccccggagccacngngggccnccngcagaaggacnccgggaacanccnccagcncancancnccgccnacgaggagcngaggagcgaggnggagcncgaggnccncggggacaccgagggccncaaccngagcnnnaccgccancngcaacaacggaacncncnnccagcaccagaagaagngcncncacangaaggngggcgacaccgccnccnncagcgngaccgngaacancccncacngngagcggcggagccgccacancancancaagcccgnggggcncggggacgcccnggagcnccnggngnccccngagngnaacngcgacngccagaaggaggncgaggngaacagcncnaagngccaccacggcaacgggagcnnccagngcggggngngcgcangccaccccggccacanggggccncgcngcgagngcggcgaggacangcngncnaccgacagcngcaaggaggccccngaccacccnagcngcncnggccgcggagacngcnacngcggccagngcancngccaccngnccccnnacgggaacannnacgggcccnacngccagngnganaacnnnnccngcgngcggcacaagggccngcngngcggaggaaanggcgacngcgacngcggcgagngcgncngncgcagcggcnggaccggggagnacngcaacngcacnacnnccacngacagcngngncagcgaggacggggngcncngnncnggccgcggggacngcgncngcggcaagngcgngngcacnaanccaggggccnccgggcccaccngcgagcggngncccaccngcggggacccnngcaacagcaagaggnccngcancgagngccaccngnccgccgccggacaggcacgcgaggagngcgncganaagngnaagcncgccggagcnacaannagcgaggaggaggacnncnccaaggacgggagcgngagcngcncccnccagggagagaacgagngccngancacnnnccncancaccacnganaacgagggaaagacaancanncacncnancaacgagaagganngncccaagcccccaaacanncccangancangcngggagngncccnggcaanccngcngancggagncgngcngcncngcancnggaagcngcncgncnccnnccacgaccgcaaggaggncgcaaagnnngaggccgagcggncnaaggccaagnggcagacagggaccaanccncncnaccgcgggncnacnncnaccnncaagaacgngacnnacaagcacagggagaagcagaaggnggaccncnccaccganngc

SEQ ID NO: 19-49 - skipped (31 entries)

SEQ ID NO: 50 - RNA, 75 nt, unidentified
  source 1..75: mol_type = unassigned RNA
  misc_difference 6: note = uracil or N1-methylpseudouracil
  misc_difference 14: note = uracil or N1-methylpseudouracil
  misc_difference 15: note = uracil or N1-methylpseudouracil
  misc_difference 16: note = uracil or N1-methylpseudouracil
  misc_difference 19: note = uracil or N1-methylpseudouracil
  misc_difference 21: note = uracil or N1-methylpseudouracil
  misc_difference 22: note = uracil or N1-methylpseudouracil
  misc_difference 27: note = uracil or N1-methylpseudouracil
  misc_difference 28: note = uracil or N1-methylpseudouracil
  misc_difference 32: note = uracil or N1-methylpseudouracil
  misc_difference 33: note = uracil or N1-methylpseudouracil
  misc_difference 34: note = uracil or N1-methylpseudouracil
  misc_difference 36: note = uracil or N1-methylpseudouracil
  misc_difference 37: note = uracil or N1-methylpseudouracil
  misc_difference 38: note = uracil or N1-methylpseudouracil
  misc_difference 39: note = uracil or N1-methylpseudouracil
  misc_difference 42: note = uracil or N1-methylpseudouracil
  misc_difference 43: note = uracil or N1-methylpseudouracil
  misc_difference 44: note = uracil or N1-methylpseudouracil
  misc_difference 45: note = uracil or N1-methylpseudouracil
  misc_difference 47: note = uracil or N1-methylpseudouracil
  misc_difference 54: note = uracil or N1-methylpseudouracil
  misc_difference 62: note = uracil or N1-methylpseudouracil
  misc_difference 63: note = uracil or N1-methylpseudouracil
  misc_difference 64: note = uracil or N1-methylpseudouracil
  misc_difference 65: note = uracil or N1-methylpseudouracil
  misc_difference 66: note = uracil or N1-methylpseudouracil
  misc_difference 68: note = uracil or N1-methylpseudouracil
  misc_difference 69: note = uracil or N1-methylpseudouracil
  misc_difference 71: note = uracil or N1-methylpseudouracil
ggaaancgcaaaannngcncnncgcgnnagannncnnnnagnnnncncgcaacnagcaagcnnnnngnncncgcc

SEQ ID NO: 51 - RNA, 203 nt, unidentified
  source 1..203: mol_type = unassigned RNA
ggaaatccccacaaccgcctcatatccaggctcaagaatagagctcagtgttttgttgtttaatcattccgacgtgttttgcgatattcgcgcaaagcagccagtcgcgcgcttgcttttaagtagagttgtttttccacccgtttgccaggcatctttaatttaacatatttttatttttcaggctaacctacgccgccacc

SEQ ID NO: 52 - RNA, 76 nt, unidentified
  source 1..76: mol_type = unassigned RNA
ggaaataagagagaaaagaagagtaagaagaaatataagatctccctgagcttcagggagccccggcgccgccacc

SEQ ID NO: 53 - RNA, 89 nt, unidentified
  source 1..89: mol_type = unassigned RNA
ggaaaccccccacccccgtaagagagaaaagaagagtaagaagaaatataagatctccctgagcttcagggagccccggcgccgccacc

SEQ ID NO: 54 - RNA, 59 nt, unidentified
  source 1..59: mol_type = unassigned RNA
ggagaacttccgcttccgttggcgcaagcgctttcattttttctgctaccgtgactaag

SEQ ID NO: 55 - RNA, 46 nt, unidentified
  source 1..46: mol_type = unassigned RNA
ggaaataagagagaaaagaagagtaagaagaaatataagagccacc

SEQ ID NO: 56 - RNA, 56 nt, unidentified
  source 1..56: mol_type = unassigned RNA
  misc_difference 6: note = uracil or N1-methylpseudouracil
  misc_difference 24: note = uracil or N1-methylpseudouracil
  misc_difference 34: note = uracil or N1-methylpseudouracil
  misc_difference 36: note = uracil or N1-methylpseudouracil
ggaaanaagagagaaaagaagagnaagaagaaananaagaccccggcgccgccacc

SEQ ID NO: 57 - RNA, 81 nt, unidentified
  source 1..81: mol_type = unassigned RNA
ggaaatcgcaaaatttgctcttcgcgttagatttcttttagttttctcgcaactagcaagctttttgttctcgccgccgcc

SEQ ID NO: 58 - RNA, 81 nt, unidentified
  source 1..81: mol_type = unassigned RNA
ggaaatcgcaaaattttcttttcgcgttagatttcttttagttttctttcaactagcaagctttttgttctcgccgccgcc

SEQ ID NO: 59 - RNA, 83 nt, unidentified
  source 1..83: mol_type = unassigned RNA
  misc_difference 14..18: note = This region may encompass 0-5 positions
  misc_difference 19: note = This region may be present or absent
  misc_difference 22: note = This region may be present or absent
  misc_difference 23..27: note = This region may encompass 0-5 positions
  misc_difference 81..83: note = This region may be present or absent
ggaaatcgcaaaatttttgctctttttcgcgttagatttcttttagttttctykcaactagcaagctttttgttctcgccrcc

SEQ ID NO: 60 - RNA, 79 nt, unidentified
  source 1..79: mol_type = unassigned RNA
ggaaaattttagcctggaacgttagataactgtcctgttgtctttatatacttggtccccaagtagtttgtcttccaaa

SEQ ID NO: 61 - RNA, 79 nt, unidentified
  source 1..79: mol_type = unassigned RNA
ggaaactttatttagtgttactttattttctgtttatttgtgtttcttcagtgggtttgttctaatttccttggccgcc

SEQ ID NO: 62 - RNA, 79 nt, unidentified
  source 1..79: mol_type = unassigned RNA
ggaaaatctgtattaggttggcgtgttctttggtcggttgttagtattgttgttgattcgtttgtggtcggttgccgcc

SEQ ID NO: 63 - RNA, 79 nt, unidentified
  source 1..79: mol_type = unassigned RNA
ggaaaattattaacatcttggtattctcgataaccattcgttggattttattgtattcgtagtttgggttcctgccgcc

SEQ ID NO: 64 - RNA, 79 nt, unidentified
  source 1..79: mol_type = unassigned RNA
ggaaattattattatttctagctacaatttatcattgtattattttagctattcatcattatttacttggtgatcaaca

SEQ ID NO: 65 - RNA, 79 nt, unidentified
  source 1..79: mol_type = unassigned RNA
ggaaataggttgttaaccaagttcaagcctaataagcttggattctggtgacttgcttcaccgttggcgggcaccgatc

SEQ ID NO: 66 - RNA, 74 nt, unidentified
  source 1..74: mol_type = unassigned RNA
ggaaatcgtagagagtcgtacttagtacatatcgactatcggtggacaccatcaagattataaaccaggccaga

SEQ ID NO: 67 - RNA, 79 nt, unidentified
  source 1..79: mol_type = unassigned RNA
ggaaacccgcccaagcgaccccaacatatcagcagttgcccaatcccaactcccaacacaatccccaagcaacgccgcc

SEQ ID NO: 68 - RNA, 79 nt, unidentified
  source 1..79: mol_type = unassigned RNA
ggaaagcgattgaaggcgtcttttcaactactcgattaaggttgggtatcgtcgtgggacttggaaatttgttgtttcc

SEQ ID NO: 69 - RNA, 79 nt, unidentified
  source 1..79: mol_type = unassigned RNA
ggaaactaatcgaaataaaagagccccgtactcttttatttctattaggttaggagccttagcatttgtatcttaggta

SEQ ID NO: 70 - RNA, 79 nt, unidentified
  source 1..79: mol_type = unassigned RNA
ggaaatgtgatttccagcaacttcttttgaatatattgaattcctaattcaaagcgaacaaatctacaagccatatacc

SEQ ID NO: 71 - RNA, 74 nt, unidentified
  source 1..74: mol_type = unassigned RNA
ggaaatcgtagagagtcgtacttacgtggtcgccattgcatagcgcgcgaaagcaacaggaacaagaacgcgcc

SEQ ID NO: 72 - RNA, 74 nt, unidentified
  source 1..74: mol_type = unassigned RNA
ggaaatcgtagagagtcgtacttagaataaacagagtcgggtcgacttgtctctgatactacgacgtcacaatc

SEQ ID NO: 73 - RNA, 79 nt, unidentified
  source 1..79: mol_type = unassigned RNA
ggaaaatttgccttcggagttgcgtatcctgaactgcccagcctcctgatatacaactgttccgcttattcgggccgcc

SEQ ID NO: 74 - RNA, 79 nt, unidentified
  source 1..79: mol_type = unassigned RNA
ggaaatctgagcaggaatcctttgtgcattgaagactttagattcctctctgcggtagacgtgcacttataagtatttg

SEQ ID NO: 75 - RNA, 79 nt, unidentified
  source 1..79: mol_type = unassigned RNA
ggaaagcgattgaaggcgtcttttcaactactcgattaaggttgggtatcgtcgtgggacttggaaatttgttgccacc

SEQ ID NO: 76 - RNA, 104 nt, unidentified
  source 1..104: mol_type = unassigned RNA
ggaaatttttttttgatattataagagtttttttttgatattaagaaaatttttttttgatattagaagagtaagaagaaatataagaccccggcgccgccacc

SEQ ID NO: 77 - RNA, 57 nt, unidentified
  source 1..57: mol_type = unassigned RNA
ggaaataagagagaaaagaagagtaagaagaaatataagagccaaaaaaaaaaaacc

SEQ ID NO: 78 - RNA, 76 nt, unidentified
  source 1..76: mol_type = unassigned RNA
ggaaatctccctgagcttcagggagtaagagagaaaagaagagtaagaagaaatataagaccccggcgccgccacc

SEQ ID NO: 79 - skipped

SEQ ID NO: 80 - RNA, 42 nt, unidentified
  source 1..42: mol_type = unassigned RNA
gggagacaagcttggcattccggtactgttggtaaagccacc

SEQ ID NO: 81 - RNA, 47 nt, unidentified
  source 1..47: mol_type = unassigned RNA
gggaattaacagagaaaagaagagtaagaagaaatataagagccacc

SEQ ID NO: 82 - RNA, 47 nt, unidentified
  source 1..47: mol_type = unassigned RNA
gggaaattagacagaaaagaagagtaagaagaaatataagagccacc

SEQ ID NO: 83 - RNA, 47 nt, unidentified
  source 1..47: mol_type = unassigned RNA
gggaaataagagagtaaagaacagtaagaagaaatataagagccacc

SEQ ID NO: 84 - RNA, 47 nt, unidentified
  source 1..47: mol_type = unassigned RNA
gggaaaaaagagagaaaagaagactaagaagaaatataagagccacc

SEQ ID NO: 85 - RNA, 47 nt, unidentified
  source 1..47: mol_type = unassigned RNA
gggaaataagagagaaaagaagagtaagaagatatataagagccacc

SEQ ID NO: 86 - RNA, 47 nt, unidentified
  source 1..47: mol_type = unassigned RNA
gggaaataagagacaaaacaagagtaagaagaaatataagagccacc

SEQ ID NO: 87 - RNA, 47 nt, unidentified
  source 1..47: mol_type = unassigned RNA
gggaaattagagagtaaagaacagtaagtagaattaaaagagccacc

SEQ ID NO: 88 - RNA, 47 nt, unidentified
  source 1..47: mol_type = unassigned RNA
gggaaataagagagaatagaagagtaagaagaaatataagagccacc

SEQ ID NO: 89 - RNA, 47 nt, unidentified
  source 1..47: mol_type = unassigned RNA
gggaaataagagagaaaagaagagtaagaagaaaattaagagccacc

SEQ ID NO: 90 - RNA, 47 nt, unidentified
  source 1..47: mol_type = unassigned RNA
gggaaataagagagaaaagaagagtaagaagaaatttaagagccacc

SEQ ID NO: 91 - RNA, 92 nt, unidentified
  source 1..92: mol_type = unassigned RNA
tcaagcttttggaccctcgtacagaagctaatacgactcactatagggaaataagagagaaaagaagagtaagaagaaatataagagccacc

SEQ ID NO: 92-99 - skipped (8 entries)

SEQ ID NO: 100 - RNA, 119 nt, unidentified
  source 1..119: mol_type = unassigned RNA
taatagtaagctggagcctcctgagagacctgtgtgaactattgagaagatcggaacagctccttactctgaggaagttggtacccccgtggtctttgaataaagtctgagtgggcggc

SEQ ID NO: 101 - RNA, 119 nt, unidentified
  source 1..119: mol_type = unassigned RNA
taatagtaagctggagcctcactctcctctccatcccgtatccaggctgtgaatttttcaaggaatataaagatcgggatgtacccccgtggtctttgaataaagtctgagtgggcggc

SEQ ID NO: 102 - RNA, 119 nt, unidentified
  source 1..119: mol_type = unassigned RNA
tgatagtaagctggagcctctagtgacggcaacagggcttggtttttccttgttgtgaaatcgacatctctgaagacagggtacccccgtggtctttgaataaagtctgagtgggcggc

SEQ ID NO: 103 - RNA, 119 nt, unidentified
  source 1..119: mol_type = unassigned RNA
tgatagtaagctggagcctccttccatctagtcacaaagactccttcgtccccagttgccgtctaggattgggcctcccagtacccccgtggtctttgaataaagtctgagtgggcggc

SEQ ID NO: 104 - RNA, 119 nt, unidentified
  source 1..119: mol_type = unassigned RNA
tgatagtaagctggagcctcccataacatgacatatctggattttgtgcttagaaccttaaattggaagcattcttaattgtacccccgtggtctttgaataaagtctgagtgggcggc

SEQ ID NO: 105 - RNA, 119 nt, unidentified
  source 1..119: mol_type = unassigned RNA
taatagtaagctggagcctccggaaaactaaaatagagatatttcaagattttataattttcaaagacctttgaaatattgtacccccgtggtctttgaataaagtctgagtgggcggc

SEQ ID NO: 106 - RNA, 119 nt, unidentified
  source 1..119: mol_type = unassigned RNA
taatagtaagctggagcctctacacattgcttctagttggcagaaataattgattaaaagaccagaaactgtgataactggtacccccgtggtctttaaataaagtctaagtgggcggc

SEQ ID NO: 107 - RNA, 119 nt, unidentified
  source 1..119: mol_type = unassigned RNA
tgataataggctggagcctcggtggccatgcttcttgccccttgggcctccccccagcccctcctccccttcctgcacccgtacccccgtggtctttgaataaagtctgagtgggcggc

SEQ ID NO: 108 - RNA, 119 nt, unidentified
  source 1..119: mol_type = unassigned RNA
tgataataggctggagcctcggtggcctagcttcttgccccttgggcctccccccagcccctcctccccttcctgcacccgtacccccgtggtctttgaataaagtctgagtgggcggc

SEQ ID NO: 109 - RNA, 141 nt, unidentified
  source 1..141: mol_type = unassigned RNA
tgataataggctggagcctcggtggccatgcttcttgccccttgggcctccccccagcccctcctccccttcctgcacccgtaccccccaaacaccattgtcacactccagtggtctttgaataaagtctgagtgggcggc

SEQ ID NO: 110 - RNA, 141 nt, unidentified
  source 1..141: mol_type = unassigned RNA
  misc_difference 1: note = uracil or N1-methylpseudouracil
  misc_difference 4: note = uracil or N1-methylpseudouracil
  misc_difference 7: note = uracil or N1-methylpseudouracil
  misc_difference 12: note = uracil or N1-methylpseudouracil
  misc_difference 19: note = uracil or N1-methylpseudouracil
  misc_difference 23: note = uracil or N1-methylpseudouracil
  misc_difference 28: note = uracil or N1-methylpseudouracil
  misc_difference 32: note = uracil or N1-methylpseudouracil
  misc_difference 33: note = uracil or N1-methylpseudouracil
  misc_difference 35: note = uracil or N1-methylpseudouracil
  misc_difference 36: note = uracil or N1-methylpseudouracil
  misc_difference 42: note = uracil or N1-methylpseudouracil
  misc_difference 43: note = uracil or N1-methylpseudouracil
  misc_difference 49: note = uracil or N1-methylpseudouracil
  misc_difference 62: note = uracil or N1-methylpseudouracil
  misc_difference 65: note = uracil or N1-methylpseudouracil
  misc_difference 70: note = uracil or N1-methylpseudouracil
  misc_difference 71: note = uracil or N1-methylpseudouracil
  misc_difference 74: note = uracil or N1-methylpseudouracil
  misc_difference 82: note = uracil or N1-methylpseudouracil
  misc_difference 98: note = uracil or N1-methylpseudouracil
  misc_difference 99: note = uracil or N1-methylpseudouracil
  misc_difference 101: note = uracil or N1-methylpseudouracil
  misc_difference 107: note = uracil or N1-methylpseudouracil
  misc_difference 112: note = uracil or N1-methylpseudouracil
  misc_difference 115: note = uracil or N1-methylpseudouracil
  misc_difference 117: note = uracil or N1-methylpseudouracil
  misc_difference 118: note = uracil or N1-methylpseudouracil
  misc_difference 119: note = uracil or N1-methylpseudouracil
  misc_difference 123: note = uracil or N1-methylpseudouracil
  misc_difference 128: note = uracil or N1-methylpseudouracil
  misc_difference 130: note = uracil or N1-methylpseudouracil
  misc_difference 134: note = uracil or N1-methylpseudouracil
nganaanaggcnggagccncggnggccnagcnncnngccccnngggccnccccccagccccnccnccccnnccngcacccgnaccccccaaacaccanngncacacnccagnggncnnngaanaaagncngagngggcggc

SEQ ID NO: 111 - RNA, 142 nt, unidentified
  source 1..142: mol_type = unassigned RNA
tgataataggctggagcctcggtggcctagcttcttgccccttgggcctccccccagcccctcctccccttcctgcacccgtaccccctccataaagtaggaaacactacagtggtctttgaataaagtctgagtgggcggc

SEQ ID NO: 112 - RNA, 141 nt, unidentified
  source 1..141: mol_type = unassigned RNA
tgataataggctggagcctcggtggcctagcttcttgccccttgggcctccccccagcccctcctccccttcctgcacccgtaccccccgcattattactcacggtacgagtggtctttgaataaagtctgagtgggcggc

SEQ ID NO: 113 - RNA, 164 nt, unidentified
  source 1..164: mol_type = unassigned RNA
tgataatagtccataaagtaggaaacactacagctggagcctcggtggccatgcttcttgccccttgggcctccccccagcccctcctccccttcctgcacccgtaccccccgcattattactcacggtacgagtggtctttgaataaagtctgagtgggcggc

SEQ ID NO: 114 - RNA, 188 nt, unidentified
  source 1..188: mol_type = unassigned RNA
tgataatagtccataaagtaggaaacactacagctggagcctcggtggcctagcttcttgccccttgggcctccataaagtaggaaacactacatccccccagcccctcctccccttcctgcacccgtaccccctccataaagtaggaaacactacagtggtctttgaataaagtctgagtgggcggc

SEQ ID NO: 115 - RNA, 60 nt, unidentified
  source 1..60: mol_type = unassigned RNA
ctgagagacctgtgtgaactattgagaagatcggaacagctccttactctgaggaagttg

SEQ ID NO: 116 - RNA, 119 nt, unidentified
  source 1..119: mol_type = unassigned RNA
tgataataggctggagcctctcacacacctctgccccttgggcctcccactcccatggctctgggcggtccagaaggagcgtacccccgtggtctttgaataaagtctgagtgggcggc

SEQ ID NO: 117 - RNA, 109 nt, unidentified
  source 1..109: mol_type = unassigned RNA
tgataataggctggagcctccaccgcgttatccgttcctcgtaggctggtcctggggaacgggtcggcgggtacccccgtggtctttgaataaagtctgagtgggcggc

SEQ ID NO: 118 - RNA, 257 nt, unidentified
  source 1..257: mol_type = unassigned RNA
tgataataggctggagcctctgcccggcaacggccaggtctgtgccaagtgtttgctgacgcaacccccactggctggggcttggtcatgggccatcagcgcgtgcgtggaaccttttcggctcctctgccgatccatactgcggaactcctagccgcttgttttgctcgcagcaggtctggagcaaacattatcgggactgataactctgttgtcctgtacccccgtggtctttgaataaagtctgagtgggcggc

SEQ ID NO: 119 - RNA, 219 nt, unidentified
  source 1..219: mol_type = unassigned RNA
tgataataggctggagcctcggtggcctagcttcttgccccttgggcctccccccagcccctcctccccttcctgcacccgtaccctttttttttttttttttttcttcttttcttttttttcttttttttttttctttctttttttctttttttttcttttcttttttcttttttttttttttttccgtggtctttgaataaagtctgagtgggcggc

SEQ ID NO: 120 - RNA, 219 nt, unidentified
  source 1..219: mol_type = unassigned RNA
tgataataggctggagcctcggtggcctagcttcttgccccttgggcctccccccagcccctcctccccttcctgcacccgtacccttttttttttttttttttttttttttttttttttttttttttttttttttttttttttttttttttttttttttttttttttttttttttttttttttttccgtggtctttgaataaagtctgagtgggcggc

SEQ ID NO: 121-132 - skipped (12 entries)

SEQ ID NO: 133 - RNA, 185 nt, unidentified
  source 1..185: mol_type = unassigned RNA
taagtctccataaagtaggaaacactacagctggagcctcggtggcctagcttcttgccccttgggcctccataaagtaggaaacactacatccccccagcccctcctccccttcctgcacccgtaccccctccataaagtaggaaacactacagtggtctttgaataaagtctgagtgggcggc

SEQ ID NO: 134 - RNA, 139 nt, unidentified
  source 1..139: mol_type = unassigned RNA
taaagcgctggagcctcggtggcctagcttcttgccccttgggcctccccccagcccctcctccccttcctgcacccgtaccccctccataaagtaggaaacactacagtggtctttgaataaagtctgagtgggcggc

SEQ ID NO: 135 - RNA, 194 nt, unidentified
  source 1..194: mol_type = unassigned RNA
taaagctccccggggtccataaagtaggaaacactacagctggagcctcctgagagacctgtgtgaactattgagaagatcggaacagctccttactctgaggaagttgtccataaagtaggaaacactacagtaccccctccataaagtaggaaacactacagtggtctttgaataaagtctgagtgggcggc

SEQ ID NO: 136 - RNA, 241 nt, unidentified
  source 1..241: mol_type = unassigned RNA
taatagtaaacctcactcacggccacattgagtgccaggctccgggctggtttatagtagtgtagagcattgcagcacttagactggggtgctgtagtctttattgtagtctttccacatacctgataattcttagataatttcttattttaattccataaagtaggaaacactacataaatctccataaagtaggaaacactacatattcttccataaagtaggaaacactacataggct

SEQ ID NO: 137 - RNA, 94 nt, unidentified
  source 1..94: mol_type = unassigned RNA
gcctccaccgcgttatccgttcctcgtaggctggtcctggggaacgggtcggcgggtacccccgtggtctttgaataaagtctgagtgggcggc

SEQ ID NO: 138 - RNA, 254 nt, unidentified
  source 1..254: mol_type = unassigned RNA
caccgcgttatccgttcctcgtaggctggtcctggggaacgggtcggcgggcctcggtggcctagcttcttgccccttgggcccaccgcgttatccgttcctcgtaggctggtcctggggaacgggtcggcggtccccccagcccctcctccccttcctgcacccgtaccccccaccgcgttatccgttcctcgtaggctggtcctggggaacgggtcggcgggtggtctttgaataaagtctgagtgggcggc

SEQ ID NO: 139 - RNA, 119 nt, unidentified
  source 1..119: mol_type = unassigned RNA
taaagctccccgggggcctcggtggcctagcttcttgccccttgggcctccccccagcccctcctccccttcctgcacccgtacccccgtggtctttgaataaagtctgagtgggcggc

SEQ ID NO: 140 - RNA, 119 nt, unidentified
  source 1..119: mol_type = unassigned RNA
taagtctccgctggagcctcggtggcctagcttcttgccccttgggcctccccccagcccctcctccccttcctgcacccgtacccccgtggtctttgaataaagtctgagtgggcggc

SEQ ID NO: 141 - RNA, 119 nt, unidentified
  source 1..119: mol_type = unassigned RNA
taagcccctccgggggcctcggtggcctagcttcttgccccttgggcctccccccagcccctcctccccttcctgcacccgtacccccgtggtctttgaataaagtctgagtgggcggc

SEQ ID NO: 142 - RNA, 185 nt, unidentified
  source 1..185: mol_type = unassigned RNA
  misc_difference 1: note = uracil or N1-methylpseudouracil
  misc_difference 9: note = uracil or N1-methylpseudouracil
  misc_difference 25: note = uracil or N1-methylpseudouracil
  misc_difference 26: note = uracil or N1-methylpseudouracil
  misc_difference 28: note = uracil or N1-methylpseudouracil
  misc_difference 34: note = uracil or N1-methylpseudouracil
  misc_difference 41: note = uracil or N1-methylpseudouracil
  misc_difference 45: note = uracil or N1-methylpseudouracil
  misc_difference 50: note = uracil or N1-methylpseudouracil
  misc_difference 54: note = uracil or N1-methylpseudouracil
  misc_difference 55: note = uracil or N1-methylpseudouracil
  misc_difference 57: note = uracil or N1-methylpseudouracil
  misc_difference 58: note = uracil or N1-methylpseudouracil
  misc_difference 64: note = uracil or N1-methylpseudouracil
  misc_difference 65: note = uracil or N1-methylpseudouracil
  misc_difference 80: note = uracil or N1-methylpseudouracil
  misc_difference 81: note = uracil or N1-methylpseudouracil
  misc_difference 83: note = uracil or N1-methylpseudouracil
  misc_difference 89: note = uracil or N1-methylpseudouracil
  misc_difference 93: note = uracil or N1-methylpseudouracil
  misc_difference 106: note = uracil or N1-methylpseudouracil
  misc_difference 109: note = uracil or N1-methylpseudouracil
  misc_difference 114: note = uracil or N1-methylpseudouracil
  misc_difference 115: note = uracil or N1-methylpseudouracil
  misc_difference 118: note = uracil or N1-methylpseudouracil
  misc_difference 126: note = uracil or N1-methylpseudouracil
  misc_difference 142: note = uracil or N1-methylpseudouracil
  misc_difference 143: note = uracil or N1-methylpseudouracil
  misc_difference 145: note = uracil or N1-methylpseudouracil
  misc_difference 151: note = uracil or N1-methylpseudouracil
  misc_difference 156: note = uracil or N1-methylpseudouracil
  misc_difference 159: note = uracil or N1-methylpseudouracil
  misc_difference 161: note = uracil or N1-methylpseudouracil
  misc_difference 162: note = uracil or N1-methylpseudouracil
  misc_difference 163: note = uracil or N1-methylpseudouracil
  misc_difference 167: note = uracil or N1-methylpseudouracil
  misc_difference 172: note = uracil or N1-methylpseudouracil
  misc_difference 174: note = uracil or N1-methylpseudouracil
  misc_difference 178: note = uracil or N1-methylpseudouracil
naagccccnccggggcaaacaccanngncacacnccagccncggnggccnagcnncnngccccnngggcccaaacaccanngncacacnccanccccccagccccnccnccccnnccngcacccgnaccccccaaacaccanngncacacnccagnggncnnngaanaaagncngagngggcggc

SEQ ID NO: 143 - RNA, 141 nt, unidentified
  source 1..141: mol_type = unassigned RNA
  misc_difference 1: note = uracil or N1-methylpseudouracil
  misc_difference 9: note = uracil or N1-methylpseudouracil
  misc_difference 19: note = uracil or N1-methylpseudouracil
  misc_difference 23: note = uracil or N1-methylpseudouracil
  misc_difference 28: note = uracil or N1-methylpseudouracil
  misc_difference 32: note = uracil or N1-methylpseudouracil
  misc_difference 33: note = uracil or N1-methylpseudouracil
  misc_difference 35: note = uracil or N1-methylpseudouracil
  misc_difference 36: note = uracil or N1-methylpseudouracil
  misc_difference 42: note = uracil or N1-methylpseudouracil
  misc_difference 43: note = uracil or N1-methylpseudouracil
  misc_difference 49: note = uracil or N1-methylpseudouracil
  misc_difference 62: note = uracil or N1-methylpseudouracil
  misc_difference 65: note = uracil or N1-methylpseudouracil
  misc_difference 70: note = uracil or N1-methylpseudouracil
  misc_difference 71: note = uracil or N1-methylpseudouracil
  misc_difference 74: note = uracil or N1-methylpseudouracil
  misc_difference 82: note = uracil or N1-methylpseudouracil
  misc_difference 98: note = uracil or N1-methylpseudouracil
  misc_difference 99: note = uracil or N1-methylpseudouracil
  misc_difference 101: note = uracil or N1-methylpseudouracil
  misc_difference 107: note = uracil or N1-methylpseudouracil
  misc_difference 112: note = uracil or N1-methylpseudouracil
  misc_difference 115: note = uracil or N1-methylpseudouracil
  misc_difference 117: note = uracil or N1-methylpseudouracil
  misc_difference 118: note = uracil or N1-methylpseudouracil
  misc_difference 119: note = uracil or N1-methylpseudouracil
  misc_difference 123: note = uracil or N1-methylpseudouracil
  misc_difference 128: note = uracil or N1-methylpseudouracil
  misc_difference 130: note = uracil or N1-methylpseudouracil
  misc_difference 134: note = uracil or N1-methylpseudouracil
naagccccnccgggggccncggnggccnagcnncnngccccnngggccnccccccagccccnccnccccnnccngcacccgnaccccccaaacaccanngncacacnccagnggncnnngaanaaagncngagngggcggc

SEQ ID NO: 144 - RNA, 141 nt, unidentified
  source 1..141: mol_type = unassigned RNA
  misc_difference 1: note = uracil or N1-methylpseudouracil
  misc_difference 9: note = uracil or N1-methylpseudouracil
  misc_difference 19: note = uracil or N1-methylpseudouracil
  misc_difference 22: note = uracil or N1-methylpseudouracil
  misc_difference 31: note = uracil or N1-methylpseudouracil
  misc_difference 33: note = uracil or N1-methylpseudouracil
  misc_difference 35: note = uracil or N1-methylpseudouracil
  misc_difference 40: note = uracil or N1-methylpseudouracil
  misc_difference 42: note = uracil or N1-methylpseudouracil
  misc_difference 43: note = uracil or N1-methylpseudouracil
  misc_difference 51: note = uracil or N1-methylpseudouracil
  misc_difference 61: note = uracil or N1-methylpseudouracil
  misc_difference 64: note = uracil or N1-methylpseudouracil
  misc_difference 65: note = uracil or N1-methylpseudouracil
  misc_difference 68: note = uracil or N1-methylpseudouracil
  misc_difference 70: note = uracil or N1-methylpseudouracil
  misc_difference 78: note = uracil or N1-methylpseudouracil
  misc_difference 79: note = uracil or N1-methylpseudouracil
  misc_difference 82: note = uracil or N1-methylpseudouracil
  misc_difference 98: note = uracil or N1-methylpseudouracil
  misc_difference 99: note = uracil or N1-methylpseudouracil
  misc_difference 101: note = uracil or N1-methylpseudouracil
  misc_difference 107: note = uracil or N1-methylpseudouracil
  misc_difference 112: note = uracil or N1-methylpseudouracil
  misc_difference 115: note = uracil or N1-methylpseudouracil
  misc_difference 117: note = uracil or N1-methylpseudouracil
  misc_difference 118: note = uracil or N1-methylpseudouracil
  misc_difference 119: note = uracil or N1-methylpseudouracil
  misc_difference 123: note = uracil or N1-methylpseudouracil
  misc_difference 128: note = uracil or N1-methylpseudouracil
  misc_difference 130: note = uracil or N1-methylpseudouracil
  misc_difference 134: note = uracil or N1-methylpseudouracil
naagccccnccgggggccnccngagagaccngngngaacnanngagaagancggaacagcnccnnacncngaggaagnnggnaccccccaaacaccanngncacacnccagnggncnnngaanaaagncngagngggcggc

SEQ ID NO: 145 - RNA, 141 nt, unidentified
  source 1..141: mol_type = unassigned RNA
  misc_difference 1: note = uracil or N1-methylpseudouracil
  misc_difference 7: note = uracil or N1-methylpseudouracil
  misc_difference 19: note = uracil or N1-methylpseudouracil
  misc_difference 23: note = uracil or N1-methylpseudouracil
  misc_difference 28: note = uracil or N1-methylpseudouracil
  misc_difference 32: note = uracil or N1-methylpseudouracil
  misc_difference 33: note = uracil or N1-methylpseudouracil
  misc_difference 35: note = uracil or N1-methylpseudouracil
  misc_difference 36: note = uracil or N1-methylpseudouracil
  misc_difference 42: note = uracil or N1-methylpseudouracil
  misc_difference 43: note = uracil or N1-methylpseudouracil
  misc_difference 49: note = uracil or N1-methylpseudouracil
  misc_difference 62: note = uracil or N1-methylpseudouracil
  misc_difference 65: note = uracil or N1-methylpseudouracil
  misc_difference 70: note = uracil or N1-methylpseudouracil
  misc_difference 71: note = uracil or N1-methylpseudouracil
  misc_difference 74: note = uracil or N1-methylpseudouracil
  misc_difference 82: note = uracil or N1-methylpseudouracil
  misc_difference 98: note = uracil or N1-methylpseudouracil
  misc_difference 99: note = uracil or N1-methylpseudouracil
  misc_difference 101: note = uracil or N1-methylpseudouracil
  misc_difference 107: note = uracil or N1-methylpseudouracil
  misc_difference 112: note = uracil or N1-methylpseudouracil
  misc_difference 115: note = uracil or N1-methylpseudouracil
  misc_difference 117: note = uracil or N1-methylpseudouracil
  misc_difference 118: note = uracil or N1-methylpseudouracil
  misc_difference 119: note = uracil or N1-methylpseudouracil
  misc_difference 123: note = uracil or N1-methylpseudouracil
  misc_difference 128: note = uracil or N1-methylpseudouracil
  misc_difference 130: note = uracil or N1-methylpseudouracil
  misc_difference 134: note = uracil or N1-methylpseudouracil
naaagcnccccgggggccncggnggccnagcnncnngccccnngggccnccccccagccccnccnccccnnccngcacccgnaccccccaaacaccanngncacacnccagnggncnnngaanaaagncngagngggcggc

SEQ ID NO: 146-151 - skipped (6 entries)

SEQ ID NO: 152 - RNA, 22 nt, unidentified
  source 1..22: mol_type = unassigned RNA
cgcattattactcacggtacga

SEQ ID NO: 153-159 - skipped (7 entries)

SEQ ID NO: 160 - RNA, 2603 nt, unidentified
  source 1..2603: mol_type = unassigned RNA
  modified_base 6: mod_base = OTHER; note = N1-methylpseudouracil
  modified_base 24: mod_base = OTHER; note = N1-methylpseudouracil
  modified_base 34: mod_base = OTHER; note = N1-methylpseudouracil
  modified_base 36: mod_base = OTHER; note = N1-methylpseudouracil
  modified_base 58: mod_base = OTHER; note = N1-methylpseudouracil
  modified_base 64: mod_base = OTHER; note = N1-methylpseudouracil
  modified_base 70: mod_base = OTHER; note = N1-methylpseudouracil
  modified_base 73: mod_base = OTHER; note = N1-methylpseudouracil
  modified_base 75: mod_base = OTHER; note = N1-methylpseudouracil
  modified_base 79: mod_base = OTHER; note = N1-methylpseudouracil
  modified_base 81: mod_base = OTHER; note = N1-methylpseudouracil
  modified_base 82: mod_base = OTHER; note = N1-methylpseudouracil
  modified_base 84: mod_base = OTHER; note = N1-methylpseudouracil
  modified_base 85: mod_base = OTHER; note = N1-methylpseudouracil
  modified_base 88: mod_base = OTHER; note = N1-methylpseudouracil
  modified_base 90: mod_base = OTHER; note = N1-methylpseudouracil
  modified_base 91: mod_base = OTHER; note = N1-methylpseudouracil
  modified_base 94: mod_base = OTHER; note = N1-methylpseudouracil
  modified_base 112: mod_base = OTHER; note = N1-methylpseudouracil
  modified_base 122: mod_base = OTHER; note = N1-methylpseudouracil
  modified_base 123: mod_base = OTHER; note = N1-methylpseudouracil
  modified_base 130: mod_base = OTHER; note = N1-methylpseudouracil
  modified_base 137: mod_base = OTHER; note = N1-methylpseudouracil
  modified_base 147: mod_base = OTHER; note = N1-methylpseudouracil
  modified_base 156: mod_base = OTHER; note = N1-methylpseudouracil
  modified_base 160: mod_base = OTHER; note = N1-methylpseudouracil
  modified_base 163: mod_base = OTHER; note = N1-methylpseudouracil
  modified_base 166: mod_base = OTHER; note = N1-methylpseudouracil
  modified_base 173: mod_base = OTHER; note = N1-methylpseudouracil
  modified_base 177: mod_base = OTHER; note = N1-methylpseudouracil
  modified_base 183: mod_base = OTHER; note = N1-methylpseudouracil
  modified_base 186: mod_base = OTHER; note = N1-methylpseudouracil
  modified_base 201: mod_base = OTHER; note = N1-methylpseudouracil
  modified_base 202: mod_base = OTHER; note = N1-methylpseudouracil
  modified_base 212: mod_base = OTHER; note = N1-methylpseudouracil
  modified_base 220: mod_base = OTHER; note = N1-methylpseudouracil
  modified_base 231: mod_base = OTHER; note = N1-methylpseudouracil
  modified_base 242: mod_base = OTHER; note = N1-methylpseudouracil
  modified_base 250: mod_base = OTHER; note = N1-methylpseudouracil
  modified_base 253: mod_base = OTHER; note = N1-methylpseudouracil
  modified_base 264: mod_base = OTHER; note = N1-methylpseudouracil
  modified_base 271: mod_base = OTHER; note = N1-methylpseudouracil
  modified_base 276: mod_base = OTHER; note = N1-methylpseudouracil
  modified_base 277: mod_base = OTHER; note = N1-methylpseudouracil
  modified_base 280: mod_base = OTHER; note = N1-methylpseudouracil
  modified_base 290: mod_base = OTHER; note = N1-methylpseudouracil
  modified_base 292: mod_base = OTHER; note = N1-methylpseudouracil
  modified_base 301: mod_base = OTHER; note = N1-methylpseudouracil
  modified_base 307: mod_base = OTHER; note = N1-methylpseudouracil
  modified_base 310: mod_base = OTHER; note = N1-methylpseudouracil
  modified_base 323: mod_base = OTHER; note = N1-methylpseudouracil
  modified_base 325: mod_base = OTHER; note = N1-methylpseudouracil
  modified_base 331: mod_base = OTHER; note = N1-methylpseudouracil
  modified_base 358: mod_base = OTHER; note = N1-methylpseudouracil
  modified_base 361: mod_base = OTHER; note = N1-methylpseudouracil
  modified_base 367: mod_base = OTHER; note = N1-methylpseudouracil
  modified_base 374: mod_base = OTHER; note = N1-methylpseudouracil
  modified_base 382: mod_base = OTHER; note = N1-methylpseudouracil
  modified_base 385: mod_base = OTHER; note = N1-methylpseudouracil
  modified_base 386: mod_base = OTHER; note = N1-methylpseudouracil
  modified_base 387: mod_base = OTHER; note = N1-methylpseudouracil
  modified_base 388: mod_base = OTHER; note = N1-methylpseudouracil
  modified_base 394: mod_base = OTHER; note = N1-methylpseudouracil
  modified_base 401: mod_base = OTHER; note = N1-methylpseudouracil
  modified_base 418: mod_base = OTHER; note = N1-methylpseudouracil
  modified_base 424: mod_base = OTHER; note = N1-methylpseudouracil
  modified_base 430: mod_base = OTHER; note = N1-methylpseudouracil
  modified_base 447: mod_base = OTHER; note = N1-methylpseudouracil
  modified_base 452: mod_base = OTHER; note = N1-methylpseudouracil
  modified_base 454: mod_base = OTHER; note = N1-methylpseudouracil
  modified_base 460: mod_base = OTHER; note = N1-methylpseudouracil
  modified_base 462: mod_base = OTHER; note = N1-methylpseudouracil
  modified_base 465: mod_base = OTHER; note = N1-methylpseudouracil
  modified_base 469: mod_base = OTHER; note = N1-methylpseudouracil
  modified_base 472: mod_base = OTHER; note = N1-methylpseudouracil
  modified_base 478: mod_base = OTHER; note = N1-methylpseudouracil
  modified_base 490: mod_base = OTHER; note = N1-methylpseudouracil
  modified_base 502: mod_base = OTHER; note = N1-methylpseudouracil
  modified_base 511: mod_base = OTHER; note = N1-methylpseudouracil
  modified_base 520: mod_base = OTHER; note = N1-methylpseudouracil
  modified_base 532: mod_base = OTHER; note = N1-methylpseudouracil
  modified_base 544: mod_base = OTHER; note = N1-methylpseudouracil
  modified_base 553: mod_base = OTHER; note = N1-methylpseudouracil
  modified_base 564: mod_base = OTHER; note = N1-methylpseudouracil
  modified_base 565: mod_base = OTHER; note = N1-methylpseudouracil
  modified_base 571: mod_base = OTHER; note = N1-methylpseudouracil
  modified_base 576: mod_base = OTHER; note = N1-methylpseudouracil
  modified_base 577: mod_base = OTHER; note = N1-methylpseudouracil
  modified_base 585: mod_base = OTHER; note = N1-methylpseudouracil
  modified_base 586: mod_base = OTHER; note = N1-methylpseudouracil
  modified_base 589: mod_base = OTHER; note = N1-methylpseudouracil
  modified_base 599: mod_base = OTHER; note = N1-methylpseudouracil
  modified_base 601: mod_base = OTHER; note = N1-methylpseudouracil
  modified_base 603: mod_base = OTHER; note = N1-methylpseudouracil
  modified_base 608: mod_base = OTHER; note = N1-methylpseudouracil
  modified_base 609: mod_base = OTHER; note = N1-methylpseudouracil
  modified_base 610: mod_base = OTHER; note = N1-methylpseudouracil
  modified_base 613: mod_base = OTHER; note = N1-methylpseudouracil
  modified_base 626: mod_base = OTHER; note = N1-methylpseudouracil
  modified_base 634: mod_base = OTHER; note = N1-methylpseudouracil
  modified_base 644: mod_base = OTHER; note = N1-methylpseudouracil
  modified_base 645: mod_base = OTHER; note = N1-methylpseudouracil
  modified_base 655: mod_base = OTHER; note = N1-methylpseudouracil
  modified_base 659: mod_base = OTHER; note = N1-methylpseudouracil
  modified_base 660: mod_base = OTHER; note = N1-methylpseudouracil
  modified_base 663: mod_base = OTHER; note = N1-methylpseudouracil
  modified_base 664: mod_base = OTHER; note = N1-methylpseudouracil
  modified_base 666: mod_base = OTHER; note = N1-methylpseudouracil
  modified_base 670: mod_base = OTHER; note = N1-methylpseudouracil
  modified_base 674: mod_base = OTHER; note = N1-methylpseudouracil
  modified_base 678: mod_base = OTHER; note = N1-methylpseudouracil
  modified_base 679: mod_base = OTHER; note = N1-methylpseudouracil
  modified_base 684: mod_base = OTHER; note = N1-methylpseudouracil
  modified_base 685: mod_base = OTHER; note = N1-methylpseudouracil
  modified_base 694: mod_base = OTHER; note = N1-methylpseudouracil
  modified_base 697: mod_base = OTHER; note = N1-methylpseudouracil
  modified_base 701: mod_base = OTHER; note = N1-methylpseudouracil
  modified_base 703: mod_base = OTHER; note = N1-methylpseudouracil
  modified_base 723: mod_base = OTHER; note = N1-methylpseudouracil
  modified_base 724: mod_base = OTHER; note = N1-methylpseudouracil
  modified_base 733: mod_base = OTHER; note = N1-methylpseudouracil
  modified_base 736: mod_base = OTHER; note = N1-methylpseudouracil
  modified_base 737: mod_base = OTHER; note = N1-methylpseudouracil
  modified_base 751: mod_base = OTHER; note = N1-methylpseudouracil
  modified_base 763: mod_base = OTHER; note = N1-methylpseudouracil
  modified_base 767: mod_base = OTHER; note = N1-methylpseudouracil
  modified_base 770: mod_base = OTHER; note = N1-methylpseudouracil
  modified_base 782: mod_base = OTHER; note = N1-methylpseudouracil
  modified_base 783: mod_base = OTHER; note = N1-methylpseudouracil
  modified_base 784: mod_base = OTHER; note = N1-methylpseudouracil
  modified_base 793: mod_base = OTHER; note = N1-methylpseudouracil
  modified_base 796: mod_base = OTHER; note = N1-methylpseudouracil
  modified_base 808: mod_base = OTHER; note = N1-methylpseudouracil
  modified_base 810: mod_base = OTHER; note = N1-methylpseudouracil
  modified_base 812: mod_base = OTHER; note = N1-methylpseudouracil
  modified_base 823: mod_base = OTHER; note = N1-methylpseudouracil
  modified_base 828: mod_base = OTHER; note = N1-methylpseudouracil
  modified_base 844: mod_base = OTHER; note = N1-methylpseudouracil
  modified_base 848: mod_base = OTHER; note = N1-methylpseudouracil
  modified_base 850: mod_base = OTHER; note = N1-methylpseudouracil
  modified_base 851: mod_base = OTHER; note = N1-methylpseudouracil
  modified_base 852: mod_base = OTHER; note = N1-methylpseudouracil
  modified_base 853: mod_base = OTHER; note = N1-methylpseudouracil
  modified_base 856: mod_base = OTHER; note = N1-methylpseudouracil
  modified_base 858: mod_base = OTHER; note = N1-methylpseudouracil
  modified_base 859: mod_base = OTHER; note = N1-methylpseudouracil
  modified_base 862: mod_base = OTHER; note = N1-methylpseudouracil
  modified_base 866: mod_base = OTHER; note = N1-methylpseudouracil
  modified_base 882: mod_base = OTHER; note = N1-methylpseudouracil
  modified_base 883: mod_base = OTHER; note = N1-methylpseudouracil
  modified_base 889: mod_base = OTHER; note = N1-methylpseudouracil
  modified_base 894: mod_base = OTHER; note = N1-methylpseudouracil
  modified_base 896: mod_base = OTHER; note = N1-methylpseudouracil
  modified_base 900: mod_base = OTHER; note = N1-methylpseudouracil
  modified_base 901: mod_base = OTHER; note = N1-methylpseudouracil
  modified_base 910: mod_base = OTHER; note = N1-methylpseudouracil
  modified_base 913: mod_base = OTHER; note = N1-methylpseudouracil
  modified_base 916: mod_base = OTHER; note = N1-methylpseudouracil
  modified_base 920: mod_base = OTHER; note = N1-methylpseudouracil
  modified_base 931: mod_base = OTHER; note = N1-methylpseudouracil
  modified_base 933: mod_base = OTHER; note = N1-methylpseudouracil
  modified_base 940: mod_base = OTHER; note = N1-methylpseudouracil
  modified_base 957: mod_base = OTHER; note = N1-methylpseudouracil
  modified_base 964: mod_base = OTHER; note = N1-methylpseudouracil
  modified_base 973: mod_base = OTHER; note = N1-methylpseudouracil
  modified_base 976: mod_base = OTHER; note = N1-methylpseudouracil
  modified_base 981: mod_base = OTHER; note = N1-methylpseudouracil
  modified_base 986: mod_base = OTHER; note = N1-methylpseudouracil
  modified_base 991: mod_base = OTHER; note = N1-methylpseudouracil
  modified_base 995: mod_base = OTHER; note = N1-methylpseudouracil
  modified_base 1000: mod_base = OTHER; note = N1-methylpseudouracil
  modified_base 1003: mod_base = OTHER; note = N1-methylpseudouracil
  modified_base 1012: mod_base = OTHER; note = N1-methylpseudouracil
  modified_base 1015: mod_base = OTHER; note = N1-methylpseudouracil
  modified_base 1027: mod_base = OTHER; note = N1-methylpseudouracil
  modified_base 1030: mod_base = OTHER; note = N1-methylpseudouracil
  modified_base 1033: mod_base = OTHER; note = N1-methylpseudouracil
  modified_base 1036: mod_base = OTHER; note = N1-methylpseudouracil
  modified_base 1038: mod_base = OTHER; note = N1-methylpseudouracil
  modified_base 1039: mod_base = OTHER; note = N1-methylpseudouracil
  modified_base 1045: mod_base = OTHER; note = N1-methylpseudouracil
  modified_base 1060: mod_base = OTHER; note = N1-methylpseudouracil
  modified_base 1066: mod_base = OTHER; note = N1-methylpseudouracil
  modified_base 1068: mod_base = OTHER; note = N1-methylpseudouracil
  modified_base 1077: mod_base = OTHER; note = N1-methylpseudouracil
  modified_base 1087: mod_base = OTHER; note = N1-methylpseudouracil
  modified_base 1090: mod_base = OTHER; note = N1-methylpseudouracil
  modified_base 1094: mod_base = OTHER; note = N1-methylpseudouracil
  modified_base 1105: mod_base = OTHER; note = N1-methylpseudouracil
  modified_base 1111: mod_base = OTHER; note = N1-methylpseudouracil
  modified_base 1114: mod_base = OTHER; note = N1-methylpseudouracil
  modified_base 1133: mod_base = OTHER; note = N1-methylpseudouracil
  modified_base 1135: mod_base = OTHER; note = N1-methylpseudouracil
  modified_base 1137: mod_base = OTHER; note = N1-methylpseudouracil
  modified_base 1138: mod_base = OTHER; note = N1-methylpseudouracil
  modified_base 1143: mod_base = OTHER; note = N1-methylpseudouracil
  modified_base 1144: mod_base = OTHER; note = N1-methylpseudouracil
  modified_base 1147: mod_base = OTHER; note = N1-methylpseudouracil
  modified_base 1148: mod_base = OTHER; note = N1-methylpseudouracil
  modified_base 1150: mod_base = OTHER; note = N1-methylpseudouracil
  modified_base 1151: mod_base = OTHER; note = N1-methylpseudouracil
  modified_base 1152: mod_base = OTHER; note = N1-methylpseudouracil
  modified_base 1158: mod_base = OTHER; note = N1-methylpseudouracil
  modified_base 1168: mod_base = OTHER; note = N1-methylpseudouracil
  modified_base 1180: mod_base = OTHER; note = N1-methylpseudouracil
  modified_base 1186: mod_base = OTHER; note = N1-methylpseudouracil
  modified_base 1192: mod_base = OTHER; note = N1-methylpseudouracil
  modified_base 1195: mod_base = OTHER; note = N1-methylpseudouracil
  modified_base 1213: mod_base = OTHER; note = N1-methylpseudouracil
  modified_base 1219: mod_base = OTHER; note = N1-methylpseudouracil
  modified_base 1224: mod_base = OTHER; note = N1-methylpseudouracil
  modified_base 1225: mod_base = OTHER; note = N1-methylpseudouracil
  modified_base 1234: mod_base = OTHER; note = N1-methylpseudouracil
  modified_base 1236: mod_base = OTHER; note = N1-methylpseudouracil
  modified_base 1252: mod_base = OTHER; note = N1-methylpseudouracil
  modified_base 1254: mod_base = OTHER; note = N1-methylpseudouracil
  modified_base 1255: mod_base = OTHER; note = N1-methylpseudouracil
  modified_base 1262: mod_base = OTHER; note = N1-methylpseudouracil
  modified_base 1272: mod_base = OTHER; note = N1-methylpseudouracil
  modified_base 1282: mod_base = OTHER; note = N1-methylpseudouracil
  modified_base 1288: mod_base = OTHER; note = N1-methylpseudouracil
  modified_base 1295: mod_base = OTHER; note = N1-methylpseudouracil
  modified_base 1305: mod_base = OTHER; note = N1-methylpseudouracil
  modified_base 1306: mod_base = OTHER; note = N1-methylpseudouracil
  modified_base 1312: mod_base = OTHER; note = N1-methylpseudouracil
  modified_base 1318: mod_base = OTHER; note = N1-methylpseudouracil
  modified_base 1324: mod_base = OTHER; note = N1-methylpseudouracil
  modified_base 1328: mod_base = OTHER; note = N1-methylpseudouracil
  modified_base 1332: mod_base = OTHER; note = N1-methylpseudouracil
  modified_base 1354: mod_base = OTHER; note = N1-methylpseudouracil
  modified_base 1357: mod_base = OTHER; note = N1-methylpseudouracil
  modified_base 1360: mod_base = OTHER; note = N1-methylpseudouracil
  modified_base 1367: mod_base = OTHER; note = N1-methylpseudouracil
  modified_base 1369: mod_base = OTHER; note = N1-methylpseudouracil
  modified_base 1375: mod_base = OTHER; note = N1-methylpseudouracil
  modified_base 1376: mod_base = OTHER; note = N1-methylpseudouracil
  modified_base 1379: mod_base = OTHER; note = N1-methylpseudouracil
  modified_base 1387: mod_base = OTHER; note = N1-methylpseudouracil
  modified_base 1393: mod_base = OTHER; note = N1-methylpseudouracil
  modified_base 1396: mod_base = OTHER; note = N1-methylpseudouracil
  modified_base 1399: mod_base = OTHER; note = N1-methylpseudouracil
  modified_base 1401: mod_base = OTHER; note = N1-methylpseudouracil
  modified_base 1410: mod_base = OTHER; note = N1-methylpseudouracil
  modified_base 1416: mod_base = OTHER; note = N1-methylpseudouracil
  modified_base 1422: mod_base = OTHER; note = N1-methylpseudouracil
  modified_base 1424: mod_base = OTHER; note = N1-methylpseudouracil
  modified_base 1435: mod_base = OTHER; note = N1-methylpseudouracil
  modified_base 1441: mod_base = OTHER; note = N1-methylpseudouracil
  modified_base 1442: mod_base = OTHER; note = N1-methylpseudouracil
  modified_base 1446: mod_base = OTHER; note = N1-methylpseudouracil
  modified_base 1448: mod_base = OTHER; note = N1-methylpseudouracil
  modified_base 1449: mod_base = OTHER; note = N1-methylpseudouracil
  modified_base 1451: mod_base = OTHER; note = N1-methylpseudouracil
  modified_base 1455: mod_base = OTHER; note = N1-methylpseudouracil
  modified_base 1475: mod_base = OTHER; note = N1-methylpseudouracil
  modified_base 1476: mod_base = OTHER; note = N1-methylpseudouracil
  modified_base 1477: mod_base = OTHER; note = N1-methylpseudouracil
  modified_base 1482: mod_base = OTHER; note = N1-methylpseudouracil
  modified_base 1489: mod_base = OTHER; note = N1-methylpseudouracil
  modified_base 1491: mod_base = OTHER; note = N1-methylpseudouracil
  modified_base 1493: mod_base = OTHER; note = N1-methylpseudouracil
  modified_base 1497: mod_base = OTHER; note = N1-methylpseudouracil
  modified_base 1505: mod_base = OTHER; note = N1-methylpseudouracil
  modified_base 1513: mod_base = OTHER; note = N1-methylpseudouracil
  modified_base 1520: mod_base = OTHER; note = N1-methylpseudouracil
  modified_base 1524: mod_base = OTHER; note = N1-methylpseudouracil
  modified_base 1530: mod_base = OTHER; note = N1-methylpseudouracil
  modified_base 1543: mod_base = OTHER; note = N1-methylpseudouracil
  modified_base 1546: mod_base = OTHER; note = N1-methylpseudouracil
  modified_base 1548: mod_base = OTHER; note = N1-methylpseudouracil
  modified_base 1550: mod_base = OTHER; note = N1-methylpseudouracil
  modified_base 1553: mod_base = OTHER; note = N1-methylpseudouracil
  modified_base 1560: mod_base = OTHER; note = N1-methylpseudouracil
  modified_base 1562: mod_base = OTHER; note = N1-methylpseudouracil
  modified_base 1574: mod_base = OTHER; note = N1-methylpseudouracil
  modified_base 1580: mod_base = OTHER; note = N1-methylpseudouracil
  modified_base 1586: mod_base = OTHER; note = N1-methylpseudouracil
  modified_base 1587: mod_base = OTHER; note = N1-methylpseudouracil
  modified_base 1589: mod_base = OTHER; note = N1-methylpseudouracil
  modified_base 1605: mod_base = OTHER; note = N1-methylpseudouracil
  modified_base 1608: mod_base = OTHER; note = N1-methylpseudouracil
  modified_base 1611: mod_base = OTHER; note = N1-methylpseudouracil
  modified_base 1620: mod_base = OTHER; note = N1-methylpseudouracil
  modified_base 1624: mod_base = OTHER; note = N1-methylpseudouracil
  modified_base 1626: mod_base = OTHER; note = N1-methylpseudouracil
  modified_base 1631: mod_base = OTHER; note = N1-methylpseudouracil
  modified_base 1633: mod_base = OTHER; note = N1-methylpseudouracil
  modified_base 1635: mod_base = OTHER; note = N1-methylpseudouracil
  modified_base 1637: mod_base = OTHER; note = N1-methylpseudouracil
  modified_base 1641: mod_base = OTHER; note = N1-methylpseudouracil
  modified_base 1649: mod_base = OTHER; note = N1-methylpseudouracil
  modified_base 1651: mod_base = OTHER; note = N1-methylpseudouracil
  modified_base 1653: mod_base = OTHER; note = N1-methylpseudouracil
  modified_base 1661: mod_base = OTHER; note = N1-methylpseudouracil
  modified_base 1662: mod_base = OTHER; note = N1-methylpseudouracil
  modified_base 1665: mod_base = OTHER; note = N1-methylpseudouracil
  modified_base 1671: mod_base = OTHER; note = N1-methylpseudouracil
  modified_base 1679: mod_base = OTHER; note = N1-methylpseudouracil
  modified_base 1680: mod_base = OTHER; note = N1-methylpseudouracil
  modified_base 1681: mod_base = OTHER; note = N1-methylpseudouracil
  modified_base 1686: mod_base = OTHER; note = N1-methylpseudouracil
  modified_base 1690: mod_base = OTHER; note = N1-methylpseudouracil
  modified_base 1691: mod_base = OTHER; note = N1-methylpseudouracil
  modified_base 1703: mod_base = OTHER; note = N1-methylpseudouracil
  modified_base 1705: mod_base = OTHER; note = N1-methylpseudouracil
  modified_base 1706: mod_base = OTHER; note = N1-methylpseudouracil
  modified_base 1708: mod_base = OTHER; note = N1-methylpseudouracil
  modified_base 1710: mod_base = OTHER; note = N1-methylpseudouracil
  modified_base 1712: mod_base = OTHER; note = N1-methylpseudouracil
  modified_base 1727: mod_base = OTHER; note = N1-methylpseudouracil
  modified_base 1728: mod_base = OTHER; note = N1-methylpseudouracil
  modified_base 1730: mod_base = OTHER; note = N1-methylpseudouracil
  modified_base 1733: mod_base = OTHER; note = N1-methylpseudouracil
  modified_base 1734: mod_base = OTHER; note = N1-methylpseudouracil
  modified_base 1739: mod_base = OTHER; note = N1-methylpseudouracil
  modified_base 1743: mod_base = OTHER; note = N1-methylpseudouracil
  modified_base 1747: mod_base = OTHER; note = N1-methylpseudouracil
  modified_base 1749: mod_base = OTHER; note = N1-methylpseudouracil
  modified_base 1761: mod_base = OTHER; note = N1-methylpseudouracil
  modified_base 1773: mod_base = OTHER; note = N1-methylpseudouracil
  modified_base 1776: mod_base = OTHER; note = N1-methylpseudouracil
  modified_base 1781: mod_base = OTHER; note = N1-methylpseudouracil
  modified_base 1782: mod_base = OTHER; note = N1-methylpseudouracil
  modified_base 1791: mod_base = OTHER; note = N1-methylpseudouracil
  modified_base 1796: mod_base = OTHER; note = N1-methylpseudouracil
  modified_base 1803: mod_base = OTHER; note = N1-methylpseudouracil
  modified_base 1807: mod_base = OTHER; note = N1-methylpseudouracil
  modified_base 1822: mod_base = OTHER; note = N1-methylpseudouracil
  modified_base 1825: mod_base = OTHER; note = N1-methylpseudouracil
  modified_base 1827: mod_base = OTHER; note = N1-methylpseudouracil
  modified_base 1845: mod_base = OTHER; note = N1-methylpseudouracil
  modified_base 1847: mod_base = OTHER; note = N1-methylpseudouracil
  modified_base 1849: mod_base = OTHER; note = N1-methylpseudouracil
  modified_base 1850: mod_base = OTHER; note = N1-methylpseudouracil
  modified_base 1851: mod_base = OTHER; note = N1-methylpseudouracil
  modified_base 1860: mod_base = OTHER; note = N1-methylpseudouracil
  modified_base 1862: mod_base = OTHER; note = N1-methylpseudouracil
  modified_base 1864: mod_base = OTHER; note = N1-methylpseudouracil
  modified_base 1866: mod_base = OTHER; note = N1-methylpseudouracil
  modified_base 1874: mod_base = OTHER; note = N1-methylpseudouracil
  modified_base 1877: mod_base = OTHER; note = N1-methylpseudouracil
  modified_base 1880: mod_base = OTHER; note = N1-methylpseudouracil
  modified_base 1883: mod_base = OTHER; note = N1-methylpseudouracil
  modified_base 1892: mod_base = OTHER; note = N1-methylpseudouracil
  modified_base 1895: mod_base = OTHER; note = N1-methylpseudouracil
  modified_base 1896: mod_base = OTHER; note = N1-methylpseudouracil
  modified_base 1905: mod_base = OTHER; note = N1-methylpseudouracil
  modified_base 1914: mod_base = OTHER; note = N1-methylpseudouracil
  modified_base 1916: mod_base = OTHER; note = N1-methylpseudouracil
  modified_base 1926: mod_base = OTHER; note = N1-methylpseudouracil
  modified_base 1932: mod_base = OTHER; note = N1-methylpseudouracil
  modified_base 1944: mod_base = OTHER; note = N1-methylpseudouracil
  modified_base 1948: mod_base = OTHER; note = N1-methylpseudouracil
  modified_base 1953: mod_base = OTHER; note = N1-methylpseudouracil
  modified_base 1955: mod_base = OTHER; note = N1-methylpseudouracil
  modified_base 1960: mod_base = OTHER; note = N1-methylpseudouracil
  modified_base 1962: mod_base = OTHER; note = N1-methylpseudouracil
  modified_base 1967: mod_base = OTHER; note = N1-methylpseudouracil
  modified_base 1989: mod_base = OTHER; note = N1-methylpseudouracil
  modified_base 1991: mod_base = OTHER; note = N1-methylpseudouracil
  modified_base 1993: mod_base = OTHER; note = N1-methylpseudouracil
  modified_base 1994: mod_base = OTHER; note = N1-methylpseudouracil
  modified_base 2001: mod_base = OTHER; note = N1-methylpseudouracil
  modified_base 2007: mod_base = OTHER; note = N1-methylpseudouracil
  modified_base 2008: mod_base = OTHER; note = N1-methylpseudouracil
  modified_base 2012: mod_base = OTHER; note = N1-methylpseudouracil
  modified_base 2023: mod_base = OTHER; note = N1-methylpseudouracil
  modified_base 2040: mod_base = OTHER; note = N1-methylpseudouracil
  modified_base 2041: mod_base = OTHER; note = N1-methylpseudouracil
  modified_base 2059: mod_base = OTHER; note = N1-methylpseudouracil
  modified_base 2064: mod_base = OTHER; note = N1-methylpseudouracil
  modified_base 2066: mod_base = OTHER; note = N1-methylpseudouracil
  modified_base 2069: mod_base = OTHER; note = N1-methylpseudouracil
  modified_base 2071: mod_base = OTHER; note = N1-methylpseudouracil
  modified_base 2088: mod_base = OTHER; note = N1-methylpseudouracil
  modified_base 2092: mod_base = OTHER; note = N1-methylpseudouracil
  modified_base 2095: mod_base = OTHER; note = N1-methylpseudouracil
  modified_base 2100: mod_base = OTHER; note = N1-methylpseudouracil
  modified_base 2101: mod_base = OTHER; note = N1-methylpseudouracil
  modified_base 2104: mod_base = OTHER; note = N1-methylpseudouracil
  modified_base 2107: mod_base = OTHER; note = N1-methylpseudouracil
  modified_base 2108: mod_base = OTHER; note = N1-methylpseudouracil
  modified_base 2111: mod_base = OTHER; note = N1-methylpseudouracil
  modified_base 2134: mod_base = OTHER; note = N1-methylpseudouracil
  modified_base 2137: mod_base = OTHER; note = N1-methylpseudouracil
  modified_base 2142: mod_base = OTHER; note = N1-methylpseudouracil
  modified_base 2146: mod_base = OTHER; note = N1-methylpseudouracil
  modified_base 2160: mod_base = OTHER; note = N1-methylpseudouracil
  modified_base 2162: mod_base = OTHER; note = N1-methylpseudouracil
  modified_base 2165: mod_base = OTHER; note = N1-methylpseudouracil
  modified_base 2171: mod_base = OTHER; note = N1-methylpseudouracil
  modified_base 2174: mod_base = OTHER; note = N1-methylpseudouracil
  modified_base 2177: mod_base = OTHER; note = N1-methylpseudouracil
  modified_base 2179: mod_base = OTHER; note = N1-methylpseudouracil
  modified_base 2183: mod_base = OTHER; note = N1-methylpseudouracil
  modified_base 2185: mod_base = OTHER; note = N1-methylpseudouracil
  modified_base 2188: mod_base = OTHER; note = N1-methylpseudouracil
  modified_base 2191: mod_base = OTHER; note = N1-methylpseudouracil
  modified_base 2194: mod_base = OTHER; note = N1-methylpseudouracil
  modified_base 2195: mod_base = OTHER; note = N1-methylpseudouracil
  modified_base 2200: mod_base = OTHER; note = N1-methylpseudouracil
  modified_base 2206: mod_base = OTHER; note = N1-methylpseudouracil
  modified_base 2212: mod_base = OTHER; note = N1-methylpseudouracil
  modified_base 2213: mod_base = OTHER; note = N1-methylpseudouracil
  modified_base 2215: mod_base = OTHER; note = N1-methylpseudouracil
  modified_base 2216: mod_base = OTHER; note = N1-methylpseudouracil
  modified_base 2218: mod_base = OTHER; note = N1-methylpseudouracil
  modified_base 2221: mod_base = OTHER; note = N1-methylpseudouracil
  modified_base 2222: mod_base = OTHER; note = N1-methylpseudouracil
  modified_base 2227: mod_base = OTHER; note = N1-methylpseudouracil
  modified_base 2230: mod_base = OTHER; note = N1-methylpseudouracil
  modified_base 2233: mod_base = OTHER; note = N1-methylpseudouracil
  modified_base 2236: mod_base = OTHER; note = N1-methylpseudouracil
  modified_base 2238: mod_base = OTHER; note = N1-methylpseudouracil
  modified_base 2240: mod_base = OTHER; note = N1-methylpseudouracil
  modified_base 2242: mod_base = OTHER; note = N1-methylpseudouracil
  modified_base 2243: mod_base = OTHER; note = N1-methylpseudouracil
  modified_base 2244: mod_base = OTHER; note = N1-methylpseudouracil
  modified_base 2251: mod_base = OTHER; note = N1-methylpseudouracil
  modified_base 2254: mod_base = OTHER; note = N1-methylpseudouracil
  modified_base 2257: mod_base = OTHER; note = N1-methylpseudouracil
  modified_base 2262: mod_base = OTHER; note = N1-methylpseudouracil
  modified_base 2263: mod_base = OTHER; note = N1-methylpseudouracil
  modified_base 2281: mod_base = OTHER; note = N1-methylpseudouracil
  modified_base 2282: mod_base = OTHER; note = N1-methylpseudouracil
  modified_base 2289: mod_base = OTHER; note = N1-methylpseudouracil
  modified_base 2290: mod_base = OTHER; note = N1-methylpseudouracil
  modified_base 2316: mod_base = OTHER; note = N1-methylpseudouracil
  modified_base 2330: mod_base = OTHER; note = N1-methylpseudouracil
  modified_base 2336: mod_base = OTHER; note = N1-methylpseudouracil
  modified_base 2338: mod_base = OTHER; note = N1-methylpseudouracil
  modified_base 2340: mod_base = OTHER; note = N1-methylpseudouracil
  modified_base 2351: mod_base = OTHER; note = N1-methylpseudouracil
  modified_base 2357: mod_base = OTHER; note = N1-methylpseudouracil
  modified_base 2361: mod_base = OTHER; note = N1-methylpseudouracil
  modified_base 2362: mod_base = OTHER; note = N1-methylpseudouracil
  modified_base 2371: mod_base = OTHER; note = N1-methylpseudouracil
  modified_base 2376: mod_base = OTHER; note = N1-methylpseudouracil
  modified_base 2401: mod_base = OTHER; note = N1-methylpseudouracil
  modified_base 2405: mod_base = OTHER; note = N1-methylpseudouracil
  modified_base 2407: mod_base = OTHER; note = N1-methylpseudouracil
  modified_base 2408: mod_base = OTHER; note = N1-methylpseudouracil
  modified_base 2409: mod_base = OTHER; note = N1-methylpseudouracil
  modified_base 2411: mod_base = OTHER; note = N1-methylpseudouracil
  modified_base 2418: mod_base = OTHER; note = N1-methylpseudouracil
  modified_base 2423: mod_base = OTHER; note = N1-methylpseudouracil
  modified_base 2429: mod_base = OTHER; note = N1-methylpseudouracil
  modified_base 2431: mod_base = OTHER; note = N1-methylpseudouracil
  modified_base 2435: mod_base = OTHER; note = N1-methylpseudouracil
  modified_base 2438: mod_base = OTHER; note = N1-methylpseudouracil
  modified_base 2443: mod_base = OTHER; note = N1-methylpseudouracil
  modified_base 2445: mod_base = OTHER; note = N1-methylpseudouracil
  modified_base 2446: mod_base = OTHER; note = N1-methylpseudouracil
  modified_base 2450: mod_base = OTHER; note = N1-methylpseudouracil
  modified_base 2451: mod_base = OTHER; note = N1-methylpseudouracil
  modified_base 2452: mod_base = OTHER; note = N1-methylpseudouracil
  modified_base 2456: mod_base = OTHER; note = N1-methylpseudouracil
  modified_base 2457: mod_base = OTHER; note = N1-methylpseudouracil
  modified_base 2463: mod_base = OTHER; note = N1-methylpseudouracil
  modified_base 2466: mod_base = OTHER; note = N1-methylpseudouracil
  modified_base 2469: mod_base = OTHER; note = N1-methylpseudouracil
  modified_base 2474: mod_base = OTHER; note = N1-methylpseudouracil
  modified_base 2481: mod_base = OTHER; note = N1-methylpseudouracil
  modified_base 2485: mod_base = OTHER; note = N1-methylpseudouracil
  modified_base 2490: mod_base = OTHER; note = N1-methylpseudouracil
  modified_base 2494: mod_base = OTHER; note = N1-methylpseudouracil
  modified_base 2495: mod_base = OTHER; note = N1-methylpseudouracil
  modified_base 2497: mod_base = OTHER; note = N1-methylpseudouracil
  modified_base 2498: mod_base = OTHER; note = N1-methylpseudouracil
  modified_base 2504: mod_base = OTHER; note = N1-methylpseudouracil
  modified_base 2505: mod_base = OTHER; note = N1-methylpseudouracil
  modified_base 2511: mod_base = OTHER; note = N1-methylpseudouracil
  modified_base 2524: mod_base = OTHER; note = N1-methylpseudouracil
  modified_base 2527: mod_base = OTHER; note = N1-methylpseudouracil
  modified_base 2532: mod_base = OTHER; note = N1-methylpseudouracil
  modified_base 2533: mod_base = OTHER; note = N1-methylpseudouracil
  modified_base 2536: mod_base = OTHER; note = N1-methylpseudouracil
  modified_base 2544: mod_base = OTHER; note = N1-methylpseudouracil
  modified_base 2560: mod_base = OTHER; note = N1-methylpseudouracil
  modified_base 2561: mod_base = OTHER; note = N1-methylpseudouracil
  modified_base 2563: mod_base = OTHER; note = N1-methylpseudouracil
  modified_base 2569: mod_base = OTHER; note = N1-methylpseudouracil
  modified_base 2574: mod_base = OTHER; note = N1-methylpseudouracil
  modified_base 2577: mod_base = OTHER; note = N1-methylpseudouracil
  modified_base 2579: mod_base = OTHER; note = N1-methylpseudouracil
  modified_base 2580: mod_base = OTHER; note = N1-methylpseudouracil
  modified_base 2581: mod_base = OTHER; note = N1-methylpseudouracil
  modified_base 2585: mod_base = OTHER; note = N1-methylpseudouracil
  modified_base 2590: mod_base = OTHER; note = N1-methylpseudouracil
  modified_base 2592: mod_base = OTHER; note = N1-methylpseudouracil
  modified_base 2596: mod_base = OTHER; note = N1-methylpseudouracil
ggaaataagagagaaaagaagagtaagaagaaatataagaccccggcgccgccaccatgggcatcgagctgctgtgcctgttcttcctgttcctgggcagaaacgaccacgtgcagggaggttgcgccctcggaggtgccgagacatgcgaggactgcctgctgatcggccctcagtgcgcctggtgcgcccaggagaacttcacccaccctagcggcgtgggcgagaggtgcgacacccctgccaacctgctggccaagggctgccagctgaacttcatcgagaaccctgtgagccaggtggagatcctgaagaacaagcctctgagcgtgggcagacagaagaacagcagcgacatcgtgcagatcgcccctcagagcctgattttgaagctccggcctggaggagcacagaccctgcaggtgcacgtgagacagaccgaggactaccctgtggacctgtactacctgatggacctgagcgccagcatggacgacgacctgaacaccatcaaggagctgggcagcagactgagcaaggagatgagcaagctgaccagcaacttcagactgggcttcggcagcttcgtggagaagcctgtatcgcctttcgtgaagaccacccctgaggagatcgccaacccttgcagcagcatcccttacttctgcctgcctaccttcggcttcaagcacatcctgcctctgaccaacgacgccgagagattcaacgagatagttaagaaccagaagatcagcgccaacatagatactccagaaggaggtttcgacgccatcatgcaggccgccgtgtgtaaggagaagatcggctggcggaacgacagcctgcatcttttggtgttcgtgagtgacgcagacagccacttcggcatggactctaagttagccggcatcgtgatccctaacgacggcctgtgccacctggacagcaagaacgagtacagcatgagcaccgtgctggagtaccctaccatcggtcagctgatcgacaagctggtgcagaacaacgtgctgctaatcttcgccgtgacccaggaacaagtccacctgtacgagaactacgccaagctgatccctggcgccaccgtgggcctgctgcagaaggacagcggcaatatcttgcagttgattatttccgcatacgaggagctgagaagcgaggtggagctggaggtgctgggcgacaccgagggcctgaacctgagcttcaccgccatctgcaacaacggcaccctgttccagcatcagaagaagtgcagccacatgaaggtgggcgatacagccagcttcagcgtgaccgtgaacatccctcactgcgagagaagaagcagacacatcatcatcaagcctgtgggccttggtgacgccctggaactgctggtatcaccagagtgcaactgcgactgtcagaaggaagtggaggttaactcttctaagtgccaccacggcaacggaagtttccagtgcggcgtctgtgcgtgccaccctggccacatgggccctcgatgcgagtgcggagaggacatgctctctactgacagctgtaaggaggcccctgaccatccgagttgtagcggcagaggcgactgctactgcggccagtgcatctgccatctatctccatacggaaatatctacggcccttactgccagtgcgacaatttcagctgcgttagacacaagggtcttctgtgtggaggaaacggcgattgtgattgcggtgagtgcgtgtgcagaagcggctggaccggcgagtactgcaattgcaccacctccactgacagctgcgtgagcgaggacggcgtgctgtgcagcggacggggcgactgtgtttgcggcaagtgtgtgtgcaccaatcctggtgctagcggccctacttgcgaaaggtgcccaacctgtggcgacccgtgcaactccaagagaagctgcatcgagtgtcacctatcagctgccggccaggccagagaggagtgtgttgacaagtgcaagttagctggagcaacaatcagcgaggaggaggacttcagcaaggacggcagcgtgagctgtagtctccaaggcgagaacgagtgcctgatcaccttcctgattactaccgacaacgagggcaagaccatcatccactccatcaacgagaaggactgtcctaagcctcctaatatccctatgatcatgcttggcgtgagcctggccattcttctgattggagtggtgctgctctgtatttggaagctactggtgagcttccacgacagaaaggaagttgccaagttcgaggcggaaaggagcaaggccaagtggcagaccggcactaaccctctgtacagaggaagtaccagtacattcaagaacgtgacctacaagcacagagagaagcagaaggtggatctttctacagactgcggtaagcctatccctaatccactgttgggtttggattccacctgataataggctggagcctcggtggcctagcttcttgccccttgggcctccccccagcccctcctccccttcctgcacccgtaccccccaaacaccattgtcacactccagtggtctttgaataaagtctgagtgggcggc

SEQ ID NO: 161 - RNA, 2622 nt, unidentified
  source 1..2622: mol_type = unassigned RNA
  modified_base 6: mod_base = OTHER; note = N1-methylpseudouracil
  modified_base 14: mod_base = OTHER; note = N1-methylpseudouracil
  modified_base 15: mod_base = OTHER; note = N1-methylpseudouracil
  modified_base 16: mod_base = OTHER; note = N1-methylpseudouracil
  modified_base 19: mod_base = OTHER; note = N1-methylpseudouracil
  modified_base 21: mod_base = OTHER; note = N1-methylpseudouracil
  modified_base 22: mod_base = OTHER; note = N1-methylpseudouracil
  modified_base 27: mod_base = OTHER; note = N1-methylpseudouracil
  modified_base 28: mod_base = OTHER; note = N1-methylpseudouracil
  modified_base 32: mod_base = OTHER; note = N1-methylpseudouracil
  modified_base 33: mod_base = OTHER; note = N1-methylpseudouracil
  modified_base 34: mod_base = OTHER; note = N1-methylpseudouracil
  modified_base 36: mod_base = OTHER; note = N1-methylpseudouracil
  modified_base 37: mod_base = OTHER; note = N1-methylpseudouracil
  modified_base 38: mod_base = OTHER; note = N1-methylpseudouracil
  modified_base 39: mod_base = OTHER; note = N1-methylpseudouracil
  modified_base 42: mod_base = OTHER; note = N1-methylpseudouracil
  modified_base 43: mod_base = OTHER; note = N1-methylpseudouracil
  modified_base 44: mod_base = OTHER; note = N1-methylpseudouracil
  modified_base 45: mod_base = OTHER; note = N1-methylpseudouracil
  modified_base 47: mod_base = OTHER; note = N1-methylpseudouracil
  modified_base 54: mod_base = OTHER; note = N1-methylpseudouracil
  modified_base 62: mod_base = OTHER; note = N1-methylpseudouracil
  modified_base 63: mod_base = OTHER; note = N1-methylpseudouracil
  modified_base 64: mod_base = OTHER; note = N1-methylpseudouracil
  modified_base 65: mod_base = OTHER; note = N1-methylpseudouracil
  modified_base 66: mod_base = OTHER; note = N1-methylpseudouracil
  modified_base 68: mod_base = OTHER; note = N1-methylpseudouracil
  modified_base 69: mod_base = OTHER; note = N1-methylpseudouracil
  modified_base 71: mod_base = OTHER; note = N1-methylpseudouracil
  modified_base 77: mod_base = OTHER; note = N1-methylpseudouracil
  modified_base 83: mod_base = OTHER; note = N1-methylpseudouracil
  modified_base 89: mod_base = OTHER; note = N1-methylpseudouracil
  modified_base 92: mod_base = OTHER; note = N1-methylpseudouracil
  modified_base 94: mod_base = OTHER; note = N1-methylpseudouracil
  modified_base 98: mod_base = OTHER; note = N1-methylpseudouracil
  modified_base 100: mod_base = OTHER; note = N1-methylpseudouracil
  modified_base 101: mod_base = OTHER; note = N1-methylpseudouracil
  modified_base 103: mod_base = OTHER; note = N1-methylpseudouracil
  modified_base 104: mod_base = OTHER; note = N1-methylpseudouracil
  modified_base 107: mod_base = OTHER; note = N1-methylpseudouracil
  modified_base 109: mod_base = OTHER; note = N1-methylpseudouracil
  modified_base 110: mod_base = OTHER; note = N1-methylpseudouracil
  modified_base 113: mod_base = OTHER; note = N1-methylpseudouracil
  modified_base 131: mod_base = OTHER; note = N1-methylpseudouracil
  modified_base 141: mod_base = OTHER; note = N1-methylpseudouracil
  modified_base 142: mod_base = OTHER; note = N1-methylpseudouracil
  modified_base 149: mod_base = OTHER; note = N1-methylpseudouracil
  modified_base 156: mod_base = OTHER; note = N1-methylpseudouracil
  modified_base 166: mod_base = OTHER; note = N1-methylpseudouracil
  modified_base 175: mod_base = OTHER; note = N1-methylpseudouracil
  modified_base 179: mod_base = OTHER; note = N1-methylpseudouracil
  modified_base 182: mod_base = OTHER; note = N1-methylpseudouracil
  modified_base 185: mod_base = OTHER; note = N1-methylpseudouracil
  modified_base 192: mod_base = OTHER; note = N1-methylpseudouracil
  modified_base 196: mod_base = OTHER; note = N1-methylpseudouracil
  modified_base 202: mod_base = OTHER; note = N1-methylpseudouracil
  modified_base 205: mod_base = OTHER; note = N1-methylpseudouracil
  modified_base 220: mod_base = OTHER; note = N1-methylpseudouracil
  modified_base 221: mod_base = OTHER; note = N1-methylpseudouracil
  modified_base 231: mod_base = OTHER; note = N1-methylpseudouracil
  modified_base 239: mod_base = OTHER; note = N1-methylpseudouracil
  modified_base 250: mod_base = OTHER; note = N1-methylpseudouracil
  modified_base 261: mod_base = OTHER; note = N1-methylpseudouracil
  modified_base 269: mod_base = OTHER; note = N1-methylpseudouracil
  modified_base 272: mod_base = OTHER; note = N1-methylpseudouracil
  modified_base 283: mod_base = OTHER; note = N1-methylpseudouracil
  modified_base 290: mod_base = OTHER; note = N1-methylpseudouracil
  modified_base 295: mod_base = OTHER; note = N1-methylpseudouracil
  modified_base 296: mod_base = OTHER; note = N1-methylpseudouracil
  modified_base 299: mod_base = OTHER; note = N1-methylpseudouracil
  modified_base 309: mod_base = OTHER; note = N1-methylpseudouracil
  modified_base 311: mod_base = OTHER; note = N1-methylpseudouracil
  modified_base 320: mod_base = OTHER; note = N1-methylpseudouracil
  modified_base 326: mod_base = OTHER; note = N1-methylpseudouracil
  modified_base 329: mod_base = OTHER; note = N1-methylpseudouracil
  modified_base 342: mod_base = OTHER; note = N1-methylpseudouracil
  modified_base 344: mod_base = OTHER; note = N1-methylpseudouracil
  modified_base 350: mod_base = OTHER; note = N1-methylpseudouracil
  modified_base 377: mod_base = OTHER; note = N1-methylpseudouracil
  modified_base 380: mod_base = OTHER; note = N1-methylpseudouracil
  modified_base 386: mod_base = OTHER; note = N1-methylpseudouracil
  modified_base 393: mod_base = OTHER; note = N1-methylpseudouracil
  modified_base 401: mod_base = OTHER; note = N1-methylpseudouracil
  modified_base 404: mod_base = OTHER; note = N1-methylpseudouracil
  modified_base 405: mod_base = OTHER; note = N1-methylpseudouracil
  modified_base 406: mod_base = OTHER; note = N1-methylpseudouracil
  modified_base 407: mod_base = OTHER; note = N1-methylpseudouracil
  modified_base 413: mod_base = OTHER; note = N1-methylpseudouracil
  modified_base 420: mod_base = OTHER; note = N1-methylpseudouracil
  modified_base 437: mod_base = OTHER; note = N1-methylpseudouracil
  modified_base 443: mod_base = OTHER; note = N1-methylpseudouracil
  modified_base 449: mod_base = OTHER; note = N1-methylpseudouracil
  modified_base 466: mod_base = OTHER; note = N1-methylpseudouracil
  modified_base 471: mod_base = OTHER; note = N1-methylpseudouracil
  modified_base 473: mod_base = OTHER; note = N1-methylpseudouracil
  modified_base 479: mod_base = OTHER; note = N1-methylpseudouracil
  modified_base 481: mod_base = OTHER; note = N1-methylpseudouracil
  modified_base 484: mod_base = OTHER; note = N1-methylpseudouracil
  modified_base 488: mod_base = OTHER; note = N1-methylpseudouracil
  modified_base 491: mod_base = OTHER; note = N1-methylpseudouracil
  modified_base 497: mod_base = OTHER; note = N1-methylpseudouracil
  modified_base 509: mod_base = OTHER; note = N1-methylpseudouracil
  modified_base 521: mod_base = OTHER; note = N1-methylpseudouracil
  modified_base 530: mod_base = OTHER; note = N1-methylpseudouracil
  modified_base 539: mod_base = OTHER; note = N1-methylpseudouracil
  modified_base 551: mod_base = OTHER; note = N1-methylpseudouracil
  modified_base 563: mod_base = OTHER; note = N1-methylpseudouracil
  modified_base 572: mod_base = OTHER; note = N1-methylpseudouracil
  modified_base 583: mod_base = OTHER; note = N1-methylpseudouracil
  modified_base 584: mod_base = OTHER; note = N1-methylpseudouracil
  modified_base 590: mod_base = OTHER; note = N1-methylpseudouracil
  modified_base 595: mod_base = OTHER; note = N1-methylpseudouracil
  modified_base 596: mod_base = OTHER; note = N1-methylpseudouracil
  modified_base 604: mod_base = OTHER; note = N1-methylpseudouracil
  modified_base 605: mod_base = OTHER; note = N1-methylpseudouracil
  modified_base 608: mod_base = OTHER; note = N1-methylpseudouracil
  modified_base 618: mod_base = OTHER; note = N1-methylpseudouracil
  modified_base 620: mod_base = OTHER; note = N1-methylpseudouracil
  modified_base 622: mod_base = OTHER; note = N1-methylpseudouracil
  modified_base 627: mod_base = OTHER; note = N1-methylpseudouracil
  modified_base 628: mod_base = OTHER; note = N1-methylpseudouracil
  modified_base 629: mod_base = OTHER; note = N1-methylpseudouracil
  modified_base 632: mod_base = OTHER; note = N1-methylpseudouracil
  modified_base 645: mod_base = OTHER; note = N1-methylpseudouracil
  modified_base 653: mod_base = OTHER; note = N1-methylpseudouracil
  modified_base 663: mod_base = OTHER; note = N1-methylpseudouracil
  modified_base 664: mod_base = OTHER; note = N1-methylpseudouracil
  modified_base 674: mod_base = OTHER; note = N1-methylpseudouracil
  modified_base 678: mod_base = OTHER; note = N1-methylpseudouracil
  modified_base 679: mod_base = OTHER; note = N1-methylpseudouracil
  modified_base 682: mod_base = OTHER; note = N1-methylpseudouracil
  modified_base 683: mod_base = OTHER; note = N1-methylpseudouracil
  modified_base 685: mod_base = OTHER; note = N1-methylpseudouracil
  modified_base 689: mod_base = OTHER; note = N1-methylpseudouracil
  modified_base 693: mod_base = OTHER; note = N1-methylpseudouracil
  modified_base 697: mod_base = OTHER; note = N1-methylpseudouracil
  modified_base 698: mod_base = OTHER; note = N1-methylpseudouracil
  modified_base 703: mod_base = OTHER; note = N1-methylpseudouracil
  modified_base 704: mod_base = OTHER; note = N1-methylpseudouracil
  modified_base 713: mod_base = OTHER; note = N1-methylpseudouracil
  modified_base 716: mod_base = OTHER; note = N1-methylpseudouracil
  modified_base 720: mod_base = OTHER; note = N1-methylpseudouracil
  modified_base 722: mod_base = OTHER; note = N1-methylpseudouracil
  modified_base 742: mod_base = OTHER; note = N1-methylpseudouracil
  modified_base 743: mod_base = OTHER; note = N1-methylpseudouracil
  modified_base 752: mod_base = OTHER; note = N1-methylpseudouracil
  modified_base 755: mod_base = OTHER; note = N1-methylpseudouracil
  modified_base 756: mod_base = OTHER; note = N1-methylpseudouracil
  modified_base 770: mod_base = OTHER; note = N1-methylpseudouracil
  modified_base 782: mod_base = OTHER; note = N1-methylpseudouracil
  modified_base 786: mod_base = OTHER; note = N1-methylpseudouracil
  modified_base 789: mod_base = OTHER; note = N1-methylpseudouracil
  modified_base 801: mod_base = OTHER; note = N1-methylpseudouracil
  modified_base 802: mod_base = OTHER; note = N1-methylpseudouracil
  modified_base 803: mod_base = OTHER; note = N1-methylpseudouracil
  modified_base 812: mod_base = OTHER; note = N1-methylpseudouracil
  modified_base 815: mod_base = OTHER; note = N1-methylpseudouracil
  modified_base 827: mod_base = OTHER; note = N1-methylpseudouracil
  modified_base 829: mod_base = OTHER; note = N1-methylpseudouracil
  modified_base 831: mod_base = OTHER; note = N1-methylpseudouracil
  modified_base 842: mod_base = OTHER; note = N1-methylpseudouracil
  modified_base 847: mod_base = OTHER; note = N1-methylpseudouracil
  modified_base 863: mod_base = OTHER; note = N1-methylpseudouracil
  modified_base 867: mod_base = OTHER; note = N1-methylpseudouracil
  modified_base 869: mod_base = OTHER; note = N1-methylpseudouracil
  modified_base 870: mod_base = OTHER; note = N1-methylpseudouracil
  modified_base 871: mod_base = OTHER; note = N1-methylpseudouracil
  modified_base 872: mod_base = OTHER; note = N1-methylpseudouracil
  modified_base 875: mod_base = OTHER; note = N1-methylpseudouracil
  modified_base 877: mod_base = OTHER; note = N1-methylpseudouracil
  modified_base 878: mod_base = OTHER; note = N1-methylpseudouracil
  modified_base 881: mod_base = OTHER; note = N1-methylpseudouracil
  modified_base 885: mod_base = OTHER; note = N1-methylpseudouracil
  modified_base 901: mod_base = OTHER; note = N1-methylpseudouracil
  modified_base 902: mod_base = OTHER; note = N1-methylpseudouracil
  modified_base 908: mod_base = OTHER; note = N1-methylpseudouracil
  modified_base 913: mod_base = OTHER; note = N1-methylpseudouracil
  modified_base 915: mod_base = OTHER; note = N1-methylpseudouracil
  modified_base 919: mod_base = OTHER; note = N1-methylpseudouracil
  modified_base 920: mod_base = OTHER; note = N1-methylpseudouracil
  modified_base 929: mod_base = OTHER; note = N1-methylpseudouracil
  modified_base 932: mod_base = OTHER; note = N1-methylpseudouracil
  modified_base 935: mod_base = OTHER; note = N1-methylpseudouracil
  modified_base 939: mod_base = OTHER; note = N1-methylpseudouracil
  modified_base 950: mod_base = OTHER; note = N1-methylpseudouracil
  modified_base 952: mod_base = OTHER; note = N1-methylpseudouracil
  modified_base 959: mod_base = OTHER; note = N1-methylpseudouracil
  modified_base 976: mod_base = OTHER; note = N1-methylpseudouracil
  modified_base 983: mod_base = OTHER; note = N1-methylpseudouracil
  modified_base 992: mod_base = OTHER; note = N1-methylpseudouracil
  modified_base 995: mod_base = OTHER; note = N1-methylpseudouracil
  modified_base 1000: mod_base = OTHER; note = N1-methylpseudouracil
  modified_base 1005: mod_base = OTHER; note = N1-methylpseudouracil
  modified_base 1010: mod_base = OTHER; note = N1-methylpseudouracil
  modified_base 1014: mod_base = OTHER; note = N1-methylpseudouracil
  modified_base 1019: mod_base = OTHER; note = N1-methylpseudouracil
  modified_base 1022: mod_base = OTHER; note = N1-methylpseudouracil
  modified_base 1031: mod_base = OTHER; note = N1-methylpseudouracil
  modified_base 1034: mod_base = OTHER; note = N1-methylpseudouracil
  modified_base 1046: mod_base = OTHER; note = N1-methylpseudouracil
  modified_base 1049: mod_base = OTHER; note = N1-methylpseudouracil
  modified_base 1052: mod_base = OTHER; note = N1-methylpseudouracil
  modified_base 1055: mod_base = OTHER; note = N1-methylpseudouracil
  modified_base 1057: mod_base = OTHER; note = N1-methylpseudouracil
  modified_base 1058: mod_base = OTHER; note = N1-methylpseudouracil
  modified_base 1064: mod_base = OTHER; note = N1-methylpseudouracil
  modified_base 1079: mod_base = OTHER; note = N1-methylpseudouracil
  modified_base 1085: mod_base = OTHER; note = N1-methylpseudouracil
  modified_base 1087: mod_base = OTHER; note = N1-methylpseudouracil
  modified_base 1096: mod_base = OTHER; note = N1-methylpseudouracil
  modified_base 1106: mod_base = OTHER; note = N1-methylpseudouracil
  modified_base 1109: mod_base = OTHER; note = N1-methylpseudouracil
  modified_base 1113: mod_base = OTHER; note = N1-methylpseudouracil
  modified_base 1124: mod_base = OTHER; note = N1-methylpseudouracil
  modified_base 1130: mod_base = OTHER; note = N1-methylpseudouracil
  modified_base 1133: mod_base = OTHER; note = N1-methylpseudouracil
  modified_base 1152: mod_base = OTHER; note = N1-methylpseudouracil
  modified_base 1154: mod_base = OTHER; note = N1-methylpseudouracil
  modified_base 1156: mod_base = OTHER; note = N1-methylpseudouracil
  modified_base 1157: mod_base = OTHER; note = N1-methylpseudouracil
  modified_base 1162: mod_base = OTHER; note = N1-methylpseudouracil
  modified_base 1163: mod_base = OTHER; note = N1-methylpseudouracil
  modified_base 1166: mod_base = OTHER; note = N1-methylpseudouracil
  modified_base 1167: mod_base = OTHER; note = N1-methylpseudouracil
  modified_base 1169: mod_base = OTHER; note = N1-methylpseudouracil
  modified_base 1170: mod_base = OTHER; note = N1-methylpseudouracil
  modified_base 1171: mod_base = OTHER; note = N1-methylpseudouracil
  modified_base 1177: mod_base = OTHER; note = N1-methylpseudouracil
  modified_base 1187: mod_base = OTHER; note = N1-methylpseudouracil
  modified_base 1199: mod_base = OTHER; note = N1-methylpseudouracil
  modified_base 1205: mod_base = OTHER; note = N1-methylpseudouracil
  modified_base 1211: mod_base = OTHER; note = N1-methylpseudouracil
  modified_base 1214: mod_base = OTHER; note = N1-methylpseudouracil
  modified_base 1232: mod_base = OTHER; note = N1-methylpseudouracil
  modified_base 1238: mod_base = OTHER; note = N1-methylpseudouracil
  modified_base 1243: mod_base = OTHER; note = N1-methylpseudouracil
  modified_base 1244: mod_base = OTHER; note = N1-methylpseudouracil
  modified_base 1253: mod_base = OTHER; note = N1-methylpseudouracil
  modified_base 1255: mod_base = OTHER; note = N1-methylpseudouracil
  modified_base 1271: mod_base = OTHER; note = N1-methylpseudouracil
  modified_base 1273: mod_base = OTHER; note = N1-methylpseudouracil
  modified_base 1274: mod_base = OTHER; note = N1-methylpseudouracil
  modified_base 1281: mod_base = OTHER; note = N1-methylpseudouracil
  modified_base 1291: mod_base = OTHER; note = N1-methylpseudouracil
  modified_base 1301: mod_base = OTHER; note = N1-methylpseudouracil
  modified_base 1307: mod_base = OTHER; note = N1-methylpseudouracil
  modified_base 1314: mod_base = OTHER; note = N1-methylpseudouracil
  modified_base 1324: mod_base = OTHER; note = N1-methylpseudouracil
  modified_base 1325: mod_base = OTHER; note = N1-methylpseudouracil
  modified_base 1331: mod_base = OTHER; note = N1-methylpseudouracil
  modified_base 1337: mod_base = OTHER; note = N1-methylpseudouracil
  modified_base 1343: mod_base = OTHER; note = N1-methylpseudouracil
  modified_base 1347: mod_base = OTHER; note = N1-methylpseudouracil
  modified_base 1351: mod_base = OTHER; note = N1-methylpseudouracil
  modified_base 1373: mod_base = OTHER; note = N1-methylpseudouracil
  modified_base 1376: mod_base = OTHER; note = N1-methylpseudouracil
  modified_base 1379: mod_base = OTHER; note = N1-methylpseudouracil
  modified_base 1386: mod_base = OTHER; note = N1-methylpseudouracil
  modified_base 1388: mod_base = OTHER; note = N1-methylpseudouracil
  modified_base 1394: mod_base = OTHER; note = N1-methylpseudouracil
  modified_base 1395: mod_base = OTHER; note = N1-methylpseudouracil
  modified_base 1398: mod_base = OTHER; note = N1-methylpseudouracil
  modified_base 1406: mod_base = OTHER; note = N1-methylpseudouracil
  modified_base 1412: mod_base = OTHER; note = N1-methylpseudouracil
  modified_base 1415: mod_base = OTHER; note = N1-methylpseudouracil
  modified_base 1418: mod_base = OTHER; note = N1-methylpseudouracil
  modified_base 1420: mod_base = OTHER; note = N1-methylpseudouracil
  modified_base 1429: mod_base = OTHER; note = N1-methylpseudouracil
  modified_base 1435: mod_base = OTHER; note = N1-methylpseudouracil
  modified_base 1441: mod_base = OTHER; note = N1-methylpseudouracil
  modified_base 1443: mod_base = OTHER; note = N1-methylpseudouracil
  modified_base 1454: mod_base = OTHER; note = N1-methylpseudouracil
  modified_base 1460: mod_base = OTHER; note = N1-methylpseudouracil
  modified_base 1461: mod_base = OTHER; note = N1-methylpseudouracil
  modified_base 1465: mod_base = OTHER; note = N1-methylpseudouracil
  modified_base 1467: mod_base = OTHER; note = N1-methylpseudouracil
  modified_base 1468: mod_base = OTHER; note = N1-methylpseudouracil
  modified_base 1470: mod_base = OTHER; note = N1-methylpseudouracil
  modified_base 1474: mod_base = OTHER; note = N1-methylpseudouracil
  modified_base 1494: mod_base = OTHER; note = N1-methylpseudouracil
  modified_base 1495: mod_base = OTHER; note = N1-methylpseudouracil
  modified_base 1496: mod_base = OTHER; note = N1-methylpseudouracil
  modified_base 1501: mod_base = OTHER; note = N1-methylpseudouracil
  modified_base 1508: mod_base = OTHER; note = N1-methylpseudouracil
  modified_base 1510: mod_base = OTHER; note = N1-methylpseudouracil
  modified_base 1512: mod_base = OTHER; note = N1-methylpseudouracil
  modified_base 1516: mod_base = OTHER; note = N1-methylpseudouracil
  modified_base 1524: mod_base = OTHER; note = N1-methylpseudouracil
  modified_base 1532: mod_base = OTHER; note = N1-methylpseudouracil
  modified_base 1539: mod_base = OTHER; note = N1-methylpseudouracil
  modified_base 1543: mod_base = OTHER; note = N1-methylpseudouracil
  modified_base 1549: mod_base = OTHER; note = N1-methylpseudouracil
  modified_base 1562: mod_base = OTHER; note = N1-methylpseudouracil
  modified_base 1565: mod_base = OTHER; note = N1-methylpseudouracil
  modified_base 1567: mod_base = OTHER; note = N1-methylpseudouracil
  modified_base 1569: mod_base = OTHER; note = N1-methylpseudouracil
  modified_base 1572: mod_base = OTHER; note = N1-methylpseudouracil
  modified_base 1579: mod_base = OTHER; note = N1-methylpseudouracil
  modified_base 1581: mod_base = OTHER; note = N1-methylpseudouracil
  modified_base 1593: mod_base = OTHER; note = N1-methylpseudouracil
  modified_base 1599: mod_base = OTHER; note = N1-methylpseudouracil
  modified_base 1605: mod_base = OTHER; note = N1-methylpseudouracil
  modified_base 1606: mod_base = OTHER; note = N1-methylpseudouracil
  modified_base 1608: mod_base = OTHER; note = N1-methylpseudouracil
  modified_base 1624: mod_base = OTHER; note = N1-methylpseudouracil
  modified_base 1627: mod_base = OTHER; note = N1-methylpseudouracil
  modified_base 1630: mod_base = OTHER; note = N1-methylpseudouracil
  modified_base 1639: mod_base = OTHER; note = N1-methylpseudouracil
  modified_base 1643: mod_base = OTHER; note = N1-methylpseudouracil
  modified_base 1645: mod_base = OTHER; note = N1-methylpseudouracil
  modified_base 1650: mod_base = OTHER; note = N1-methylpseudouracil
  modified_base 1652: mod_base = OTHER; note = N1-methylpseudouracil
  modified_base 1654: mod_base = OTHER; note = N1-methylpseudouracil
  modified_base 1656: mod_base = OTHER; note = N1-methylpseudouracil
  modified_base 1660: mod_base = OTHER; note = N1-methylpseudouracil
  modified_base 1668: mod_base = OTHER; note = N1-methylpseudouracil
  modified_base 1670: mod_base = OTHER; note = N1-methylpseudouracil
  modified_base 1672: mod_base = OTHER; note = N1-methylpseudouracil
  modified_base 1680: mod_base = OTHER; note = N1-methylpseudouracil
  modified_base 1681: mod_base = OTHER; note = N1-methylpseudouracil
  modified_base 1684: mod_base = OTHER; note = N1-methylpseudouracil
  modified_base 1690: mod_base = OTHER; note = N1-methylpseudouracil
  modified_base 1698: mod_base = OTHER; note = N1-methylpseudouracil
  modified_base 1699: mod_base = OTHER; note = N1-methylpseudouracil
  modified_base 1700: mod_base = OTHER; note = N1-methylpseudouracil
  modified_base 1705: mod_base = OTHER; note = N1-methylpseudouracil
  modified_base 1709: mod_base = OTHER; note = N1-methylpseudouracil
  modified_base 1710: mod_base = OTHER; note = N1-methylpseudouracil
  modified_base 1722: mod_base = OTHER; note = N1-methylpseudouracil
  modified_base 1724: mod_base = OTHER; note = N1-methylpseudouracil
  modified_base 1725: mod_base = OTHER; note = N1-methylpseudouracil
  modified_base 1727: mod_base = OTHER; note = N1-methylpseudouracil
  modified_base 1729: mod_base = OTHER; note = N1-methylpseudouracil
  modified_base 1731: mod_base = OTHER; note = N1-methylpseudouracil
  modified_base 1746: mod_base = OTHER; note = N1-methylpseudouracil
  modified_base 1747: mod_base = OTHER; note = N1-methylpseudouracil
  modified_base 1749: mod_base = OTHER; note = N1-methylpseudouracil
  modified_base 1752: mod_base = OTHER; note = N1-methylpseudouracil
  modified_base 1753: mod_base = OTHER; note = N1-methylpseudouracil
  modified_base 1758: mod_base = OTHER; note = N1-methylpseudouracil
  modified_base 1762: mod_base = OTHER; note = N1-methylpseudouracil
  modified_base 1766: mod_base = OTHER; note = N1-methylpseudouracil
  modified_base 1768: mod_base = OTHER; note = N1-methylpseudouracil
  modified_base 1780: mod_base = OTHER; note = N1-methylpseudouracil
  modified_base 1792: mod_base = OTHER; note = N1-methylpseudouracil
  modified_base 1795: mod_base = OTHER; note = N1-methylpseudouracil
  modified_base 1800: mod_base = OTHER; note = N1-methylpseudouracil
  modified_base 1801: mod_base = OTHER; note = N1-methylpseudouracil
  modified_base 1810: mod_base = OTHER; note = N1-methylpseudouracil
  modified_base 1815: mod_base = OTHER; note = N1-methylpseudouracil
  modified_base 1822: mod_base = OTHER; note = N1-methylpseudouracil
  modified_base 1826: mod_base = OTHER; note = N1-methylpseudouracil
  modified_base 1841: mod_base = OTHER; note = N1-methylpseudouracil
  modified_base 1844: mod_base = OTHER; note = N1-methylpseudouracil
  modified_base 1846: mod_base = OTHER; note = N1-methylpseudouracil
  modified_base 1864: mod_base = OTHER; note = N1-methylpseudouracil
  modified_base 1866: mod_base = OTHER; note = N1-methylpseudouracil
  modified_base 1868: mod_base = OTHER; note = N1-methylpseudouracil
  modified_base 1869: mod_base = OTHER; note = N1-methylpseudouracil
  modified_base 1870: mod_base = OTHER; note = N1-methylpseudouracil
  modified_base 1879: mod_base = OTHER; note = N1-methylpseudouracil
  modified_base 1881: mod_base = OTHER; note = N1-methylpseudouracil
  modified_base 1883: mod_base = OTHER; note = N1-methylpseudouracil
  modified_base 1885: mod_base = OTHER; note = N1-methylpseudouracil
  modified_base 1893: mod_base = OTHER; note = N1-methylpseudouracil
  modified_base 1896: mod_base = OTHER; note = N1-methylpseudouracil
  modified_base 1899: mod_base = OTHER; note = N1-methylpseudouracil
  modified_base 1902: mod_base = OTHER; note = N1-methylpseudouracil
  modified_base 1911: mod_base = OTHER; note = N1-methylpseudouracil
  modified_base 1914: mod_base = OTHER; note = N1-methylpseudouracil
  modified_base 1915: mod_base = OTHER; note = N1-methylpseudouracil
  modified_base 1924: mod_base = OTHER; note = N1-methylpseudouracil
  modified_base 1933: mod_base = OTHER; note = N1-methylpseudouracil
  modified_base 1935: mod_base = OTHER; note = N1-methylpseudouracil
  modified_base 1945: mod_base = OTHER; note = N1-methylpseudouracil
  modified_base 1951: mod_base = OTHER; note = N1-methylpseudouracil
  modified_base 1963: mod_base = OTHER; note = N1-methylpseudouracil
  modified_base 1967: mod_base = OTHER; note = N1-methylpseudouracil
  modified_base 1972: mod_base = OTHER; note = N1-methylpseudouracil
  modified_base 1974: mod_base = OTHER; note = N1-methylpseudouracil
  modified_base 1979: mod_base = OTHER; note = N1-methylpseudouracil
  modified_base 1981: mod_base = OTHER; note = N1-methylpseudouracil
  modified_base 1986: mod_base = OTHER; note = N1-methylpseudouracil
  modified_base 2008: mod_base = OTHER; note = N1-methylpseudouracil
  modified_base 2010: mod_base = OTHER; note = N1-methylpseudouracil
  modified_base 2012: mod_base = OTHER; note = N1-methylpseudouracil
  modified_base 2013: mod_base = OTHER; note = N1-methylpseudouracil
  modified_base 2020: mod_base = OTHER; note = N1-methylpseudouracil
  modified_base 2026: mod_base = OTHER; note = N1-methylpseudouracil
  modified_base 2027: mod_base = OTHER; note = N1-methylpseudouracil
  modified_base 2031: mod_base = OTHER; note = N1-methylpseudouracil
  modified_base 2042: mod_base = OTHER; note = N1-methylpseudouracil
  modified_base 2059: mod_base = OTHER; note = N1-methylpseudouracil
  modified_base 2060: mod_base = OTHER; note = N1-methylpseudouracil
  modified_base 2078: mod_base = OTHER; note = N1-methylpseudouracil
  modified_base 2083: mod_base = OTHER; note = N1-methylpseudouracil
  modified_base 2085: mod_base = OTHER; note = N1-methylpseudouracil
  modified_base 2088: mod_base = OTHER; note = N1-methylpseudouracil
  modified_base 2090: mod_base = OTHER; note = N1-methylpseudouracil
  modified_base 2107: mod_base = OTHER; note = N1-methylpseudouracil
  modified_base 2111: mod_base = OTHER; note = N1-methylpseudouracil
  modified_base 2114: mod_base = OTHER; note = N1-methylpseudouracil
  modified_base 2119: mod_base = OTHER; note = N1-methylpseudouracil
  modified_base 2120: mod_base = OTHER; note = N1-methylpseudouracil
  modified_base 2123: mod_base = OTHER; note = N1-methylpseudouracil
  modified_base 2126: mod_base = OTHER; note = N1-methylpseudouracil
  modified_base 2127: mod_base = OTHER; note = N1-methylpseudouracil
  modified_base 2130: mod_base = OTHER; note = N1-methylpseudouracil
  modified_base 2153: mod_base = OTHER; note = N1-methylpseudouracil
  modified_base 2156: mod_base = OTHER; note = N1-methylpseudouracil
  modified_base 2161: mod_base = OTHER; note = N1-methylpseudouracil
  modified_base 2165: mod_base = OTHER; note = N1-methylpseudouracil
  modified_base 2179: mod_base = OTHER; note = N1-methylpseudouracil
  modified_base 2181: mod_base = OTHER; note = N1-methylpseudouracil
  modified_base 2184: mod_base = OTHER; note = N1-methylpseudouracil
  modified_base 2190: mod_base = OTHER; note = N1-methylpseudouracil
  modified_base 2193: mod_base = OTHER; note = N1-methylpseudouracil
  modified_base 2196: mod_base = OTHER; note = N1-methylpseudouracil
  modified_base 2198: mod_base = OTHER; note = N1-methylpseudouracil
  modified_base 2202: mod_base = OTHER; note = N1-methylpseudouracil
  modified_base 2204: mod_base = OTHER; note = N1-methylpseudouracil
  modified_base 2207: mod_base = OTHER; note = N1-methylpseudouracil
  modified_base 2210: mod_base = OTHER; note = N1-methylpseudouracil
  modified_base 2213: mod_base = OTHER; note = N1-methylpseudouracil
  modified_base 2214: mod_base = OTHER; note = N1-methylpseudouracil
  modified_base 2219: mod_base = OTHER; note = N1-methylpseudouracil
  modified_base 2225: mod_base = OTHER; note = N1-methylpseudouracil
  modified_base 2231: mod_base = OTHER; note = N1-methylpseudouracil
  modified_base 2232: mod_base = OTHER; note = N1-methylpseudouracil
  modified_base 2234: mod_base = OTHER; note = N1-methylpseudouracil
  modified_base 2235: mod_base = OTHER; note = N1-methylpseudouracil
  modified_base 2237: mod_base = OTHER; note = N1-methylpseudouracil
  modified_base 2240: mod_base = OTHER; note = N1-methylpseudouracil
  modified_base 2241: mod_base = OTHER; note = N1-methylpseudouracil
  modified_base 2246: mod_base = OTHER; note = N1-methylpseudouracil
  modified_base 2249: mod_base = OTHER; note = N1-methylpseudouracil
  modified_base 2252: mod_base = OTHER; note = N1-methylpseudouracil
  modified_base 2255: mod_base = OTHER; note = N1-methylpseudouracil
  modified_base 2257: mod_base = OTHER; note = N1-methylpseudouracil
  modified_base 2259: mod_base = OTHER; note = N1-methylpseudouracil
  modified_base 2261: mod_base = OTHER; note = N1-methylpseudouracil
  modified_base 2262: mod_base = OTHER; note = N1-methylpseudouracil
  modified_base 2263: mod_base = OTHER; note = N1-methylpseudouracil
  modified_base 2270: mod_base = OTHER; note = N1-methylpseudouracil
  modified_base 2273: mod_base = OTHER; note = N1-methylpseudouracil
  modified_base 2276: mod_base = OTHER; note = N1-methylpseudouracil
  modified_base 2281: mod_base = OTHER; note = N1-methylpseudouracil
  modified_base 2282: mod_base = OTHER; note = N1-methylpseudouracil
  modified_base 2300: mod_base = OTHER; note = N1-methylpseudouracil
  modified_base 2301: mod_base = OTHER; note = N1-methylpseudouracil
  modified_base 2308: mod_base = OTHER; note = N1-methylpseudouracil
  modified_base 2309: mod_base = OTHER; note = N1-methylpseudouracil
  modified_base 2335: mod_base = OTHER; note = N1-methylpseudouracil
  modified_base 2349: mod_base = OTHER; note = N1-methylpseudouracil
  modified_base 2355: mod_base = OTHER; note = N1-methylpseudouracil
  modified_base 2357: mod_base = OTHER; note = N1-methylpseudouracil
  modified_base 2359: mod_base = OTHER; note = N1-methylpseudouracil
  modified_base 2370: mod_base = OTHER; note = N1-methylpseudouracil
  modified_base 2376: mod_base = OTHER; note = N1-methylpseudouracil
  modified_base 2380: mod_base = OTHER; note = N1-methylpseudouracil
  modified_base 2381: mod_base = OTHER; note = N1-methylpseudouracil
  modified_base 2390: mod_base = OTHER; note = N1-methylpseudouracil
  modified_base 2395: mod_base = OTHER; note = N1-methylpseudouracil
  modified_base 2420: mod_base = OTHER; note = N1-methylpseudouracil
  modified_base 2424: mod_base = OTHER; note = N1-methylpseudouracil
  modified_base 2426: mod_base = OTHER; note = N1-methylpseudouracil
  modified_base 2427: mod_base = OTHER; note = N1-methylpseudouracil
  modified_base 2428: mod_base = OTHER; note = N1-methylpseudouracil
  modified_base 2430: mod_base = OTHER; note = N1-methylpseudouracil
  modified_base 2437: mod_base = OTHER; note = N1-methylpseudouracil
  modified_base 2442: mod_base = OTHER; note = N1-methylpseudouracil
  modified_base 2448: mod_base = OTHER; note = N1-methylpseudouracil
  modified_base 2450: mod_base = OTHER; note = N1-methylpseudouracil
  modified_base 2454: mod_base = OTHER; note = N1-methylpseudouracil
  modified_base 2457: mod_base = OTHER; note = N1-methylpseudouracil
  modified_base 2462: mod_base = OTHER; note = N1-methylpseudouracil
  modified_base 2464: mod_base = OTHER; note = N1-methylpseudouracil
  modified_base 2465: mod_base = OTHER; note = N1-methylpseudouracil
  modified_base 2469: mod_base = OTHER; note = N1-methylpseudouracil
  modified_base 2470: mod_base = OTHER; note = N1-methylpseudouracil
  modified_base 2471: mod_base = OTHER; note = N1-methylpseudouracil
  modified_base 2475: mod_base = OTHER; note = N1-methylpseudouracil
  modified_base 2476: mod_base = OTHER; note = N1-methylpseudouracil
  modified_base 2482: mod_base = OTHER; note = N1-methylpseudouracil
  modified_base 2485: mod_base = OTHER; note = N1-methylpseudouracil
  modified_base 2488: mod_base = OTHER; note = N1-methylpseudouracil
  modified_base 2493: mod_base = OTHER; note = N1-methylpseudouracil
  modified_base 2500: mod_base = OTHER; note = N1-methylpseudouracil
  modified_base 2504: mod_base = OTHER; note = N1-methylpseudouracil
  modified_base 2509: mod_base = OTHER; note = N1-methylpseudouracil
  modified_base 2513: mod_base = OTHER; note = N1-methylpseudouracil
  modified_base 2514: mod_base = OTHER; note = N1-methylpseudouracil
  modified_base 2516: mod_base = OTHER; note = N1-methylpseudouracil
  modified_base 2517: mod_base = OTHER; note = N1-methylpseudouracil
  modified_base 2523: mod_base = OTHER; note = N1-methylpseudouracil
  modified_base 2524: mod_base = OTHER; note = N1-methylpseudouracil
  modified_base 2530: mod_base = OTHER; note = N1-methylpseudouracil
  modified_base 2543: mod_base = OTHER; note = N1-methylpseudouracil
  modified_base 2546: mod_base = OTHER; note = N1-methylpseudouracil
  modified_base 2551: mod_base = OTHER; note = N1-methylpseudouracil
  modified_base 2552: mod_base = OTHER; note = N1-methylpseudouracil
  modified_base 2555: mod_base = OTHER; note = N1-methylpseudouracil
  modified_base 2563: mod_base = OTHER; note = N1-methylpseudouracil
  modified_base 2579: mod_base = OTHER; note = N1-methylpseudouracil
  modified_base 2580: mod_base = OTHER; note = N1-methylpseudouracil
  modified_base 2582: mod_base = OTHER; note = N1-methylpseudouracil
  modified_base 2588: mod_base = OTHER; note = N1-methylpseudouracil
  modified_base 2593: mod_base = OTHER; note = N1-methylpseudouracil
  modified_base 2596: mod_base = OTHER; note = N1-methylpseudouracil
  modified_base 2598: mod_base = OTHER; note = N1-methylpseudouracil
  modified_base 2599: mod_base = OTHER; note = N1-methylpseudouracil
  modified_base 2600: mod_base = OTHER; note = N1-methylpseudouracil
  modified_base 2604: mod_base = OTHER; note = N1-methylpseudouracil
  modified_base 2609: mod_base = OTHER; note = N1-methylpseudouracil
  modified_base 2611: mod_base = OTHER; note = N1-methylpseudouracil
  modified_base 2615: mod_base = OTHER; note = N1-methylpseudouracil
ggaaatcgcaaaatttgctcttcgcgttagatttcttttagttttctcgcaactagcaagctttttgttctcgccatgggcatcgagctgctgtgcctgttcttcctgttcctgggcagaaacgaccacgtgcagggaggttgcgccctcggaggtgccgagacatgcgaggactgcctgctgatcggccctcagtgcgcctggtgcgcccaggagaacttcacccaccctagcggcgtgggcgagaggtgcgacacccctgccaacctgctggccaagggctgccagctgaacttcatcgagaaccctgtgagccaggtggagatcctgaagaacaagcctctgagcgtgggcagacagaagaacagcagcgacatcgtgcagatcgcccctcagagcctgattttgaagctccggcctggaggagcacagaccctgcaggtgcacgtgagacagaccgaggactaccctgtggacctgtactacctgatggacctgagcgccagcatggacgacgacctgaacaccatcaaggagctgggcagcagactgagcaaggagatgagcaagctgaccagcaacttcagactgggcttcggcagcttcgtggagaagcctgtatcgcctttcgtgaagaccacccctgaggagatcgccaacccttgcagcagcatcccttacttctgcctgcctaccttcggcttcaagcacatcctgcctctgaccaacgacgccgagagattcaacgagatagttaagaaccagaagatcagcgccaacatagatactccagaaggaggtttcgacgccatcatgcaggccgccgtgtgtaaggagaagatcggctggcggaacgacagcctgcatcttttggtgttcgtgagtgacgcagacagccacttcggcatggactctaagttagccggcatcgtgatccctaacgacggcctgtgccacctggacagcaagaacgagtacagcatgagcaccgtgctggagtaccctaccatcggtcagctgatcgacaagctggtgcagaacaacgtgctgctaatcttcgccgtgacccaggaacaagtccacctgtacgagaactacgccaagctgatccctggcgccaccgtgggcctgctgcagaaggacagcggcaatatcttgcagttgattatttccgcatacgaggagctgagaagcgaggtggagctggaggtgctgggcgacaccgagggcctgaacctgagcttcaccgccatctgcaacaacggcaccctgttccagcatcagaagaagtgcagccacatgaaggtgggcgatacagccagcttcagcgtgaccgtgaacatccctcactgcgagagaagaagcagacacatcatcatcaagcctgtgggccttggtgacgccctggaactgctggtatcaccagagtgcaactgcgactgtcagaaggaagtggaggttaactcttctaagtgccaccacggcaacggaagtttccagtgcggcgtctgtgcgtgccaccctggccacatgggccctcgatgcgagtgcggagaggacatgctctctactgacagctgtaaggaggcccctgaccatccgagttgtagcggcagaggcgactgctactgcggccagtgcatctgccatctatctccatacggaaatatctacggcccttactgccagtgcgacaatttcagctgcgttagacacaagggtcttctgtgtggaggaaacggcgattgtgattgcggtgagtgcgtgtgcagaagcggctggaccggcgagtactgcaattgcaccacctccactgacagctgcgtgagcgaggacggcgtgctgtgcagcggacggggcgactgtgtttgcggcaagtgtgtgtgcaccaatcctggtgctagcggccctacttgcgaaaggtgcccaacctgtggcgacccgtgcaactccaagagaagctgcatcgagtgtcacctatcagctgccggccaggccagagaggagtgtgttgacaagtgcaagttagctggagcaacaatcagcgaggaggaggacttcagcaaggacggcagcgtgagctgtagtctccaaggcgagaacgagtgcctgatcaccttcctgattactaccgacaacgagggcaagaccatcatccactccatcaacgagaaggactgtcctaagcctcctaatatccctatgatcatgcttggcgtgagcctggccattcttctgattggagtggtgctgctctgtatttggaagctactggtgagcttccacgacagaaaggaagttgccaagttcgaggcggaaaggagcaaggccaagtggcagaccggcactaaccctctgtacagaggaagtaccagtacattcaagaacgtgacctacaagcacagagagaagcagaaggtggatctttctacagactgcggtaagcctatccctaatccactgttgggtttggattccacctgataataggctggagcctcggtggcctagcttcttgccccttgggcctccccccagcccctcctccccttcctgcacccgtaccccccaaacaccattgtcacactccagtggtctttgaataaagtctgagtgggcggc

SEQ ID NO: 162 - RNA, 2622 nt, unidentified
  source 1..2622: mol_type = unassigned RNA
  modified_base 6: mod_base = OTHER; note = N1-methylpseudouracil
  modified_base 14: mod_base = OTHER; note = N1-methylpseudouracil
  modified_base 15: mod_base = OTHER; note = N1-methylpseudouracil
  modified_base 16: mod_base = OTHER; note = N1-methylpseudouracil
  modified_base 19: mod_base = OTHER; note = N1-methylpseudouracil
  modified_base 21: mod_base = OTHER; note = N1-methylpseudouracil
  modified_base 22: mod_base = OTHER; note = N1-methylpseudouracil
  modified_base 27: mod_base = OTHER; note = N1-methylpseudouracil
  modified_base 28: mod_base = OTHER; note = N1-methylpseudouracil
  modified_base 32: mod_base = OTHER; note = N1-methylpseudouracil
  modified_base 33: mod_base = OTHER; note = N1-methylpseudouracil
  modified_base 34: mod_base = OTHER; note = N1-methylpseudouracil
  modified_base 36: mod_base = OTHER; note = N1-methylpseudouracil
  modified_base 37: mod_base = OTHER; note = N1-methylpseudouracil
  modified_base 38: mod_base = OTHER; note = N1-methylpseudouracil
  modified_base 39: mod_base = OTHER; note = N1-methylpseudouracil
  modified_base 42: mod_base = OTHER; note = N1-methylpseudouracil
  modified_base 43: mod_base = OTHER; note = N1-methylpseudouracil
  modified_base 44: mod_base = OTHER; note = N1-methylpseudouracil
  modified_base 45: mod_base = OTHER; note = N1-methylpseudouracil
  modified_base 47: mod_base = OTHER; note = N1-methylpseudouracil
  modified_base 54: mod_base = OTHER; note = N1-methylpseudouracil
  modified_base 62: mod_base = OTHER; note = N1-methylpseudouracil
  modified_base 63: mod_base = OTHER; note = N1-methylpseudouracil
  modified_base 64: mod_base = OTHER; note = N1-methylpseudouracil
  modified_base 65: mod_base = OTHER; note = N1-methylpseudouracil
  modified_base 66: mod_base = OTHER; note = N1-methylpseudouracil
  modified_base 68: mod_base = OTHER; note = N1-methylpseudouracil
  modified_base 69: mod_base = OTHER; note = N1-methylpseudouracil
  modified_base 71: mod_base = OTHER; note = N1-methylpseudouracil
  modified_base 77: mod_base = OTHER; note = N1-methylpseudouracil
  modified_base 83: mod_base = OTHER; note = N1-methylpseudouracil
  modified_base 89: mod_base = OTHER; note = N1-methylpseudouracil
  modified_base 92: mod_base = OTHER; note = N1-methylpseudouracil
  modified_base 94: mod_base = OTHER; note = N1-methylpseudouracil
  modified_base 98: mod_base = OTHER; note = N1-methylpseudouracil
  modified_base 100: mod_base = OTHER; note = N1-methylpseudouracil
  modified_base 101: mod_base = OTHER; note = N1-methylpseudouracil
  modified_base 103: mod_base = OTHER; note = N1-methylpseudouracil
  modified_base 104: mod_base = OTHER; note = N1-methylpseudouracil
  modified_base 107: mod_base = OTHER; note = N1-methylpseudouracil
  modified_base 109: mod_base = OTHER; note = N1-methylpseudouracil
  modified_base 110: mod_base = OTHER; note = N1-methylpseudouracil
  modified_base 113: mod_base = OTHER; note = N1-methylpseudouracil
  modified_base 131: mod_base = OTHER; note = N1-methylpseudouracil
  modified_base 141: mod_base = OTHER; note = N1-methylpseudouracil
  modified_base 142: mod_base = OTHER; note = N1-methylpseudouracil
  modified_base 149: mod_base = OTHER; note = N1-methylpseudouracil
  modified_base 156: mod_base = OTHER; note = N1-methylpseudouracil
  modified_base 166: mod_base = OTHER; note = N1-methylpseudouracil
  modified_base 175: mod_base = OTHER; note = N1-methylpseudouracil
  modified_base 179: mod_base = OTHER; note = N1-methylpseudouracil
  modified_base 182: mod_base = OTHER; note = N1-methylpseudouracil
  modified_base 185: mod_base = OTHER; note = N1-methylpseudouracil
  modified_base 192: mod_base = OTHER; note = N1-methylpseudouracil
  modified_base 196: mod_base = OTHER; note = N1-methylpseudouracil
  modified_base 202: mod_base = OTHER; note = N1-methylpseudouracil
  modified_base 205: mod_base = OTHER; note = N1-methylpseudouracil
  modified_base 220: mod_base = OTHER; note = N1-methylpseudouracil
  modified_base 221: mod_base = OTHER; note = N1-methylpseudouracil
  modified_base 231: mod_base = OTHER; note = N1-methylpseudouracil
  modified_base 239: mod_base = OTHER; note = N1-methylpseudouracil
  modified_base 250: mod_base = OTHER; note = N1-methylpseudouracil
  modified_base 261: mod_base = OTHER; note = N1-methylpseudouracil
  modified_base 269: mod_base = OTHER; note = N1-methylpseudouracil
  modified_base 272: mod_base = OTHER; note = N1-methylpseudouracil
  modified_base 283: mod_base = OTHER; note = N1-methylpseudouracil
  modified_base 290: mod_base = OTHER; note = N1-methylpseudouracil
  modified_base 295: mod_base = OTHER; note = N1-methylpseudouracil
  modified_base 296: mod_base = OTHER; note = N1-methylpseudouracil
  modified_base 299: mod_base = OTHER; note = N1-methylpseudouracil
  modified_base 309: mod_base = OTHER; note = N1-methylpseudouracil
  modified_base 311: mod_base = OTHER; note = N1-methylpseudouracil
  modified_base 320: mod_base = OTHER; note = N1-methylpseudouracil
  modified_base 326: mod_base = OTHER; note = N1-methylpseudouracil
  modified_base 329: mod_base = OTHER; note = N1-methylpseudouracil
  modified_base 342: mod_base = OTHER; note = N1-methylpseudouracil
  modified_base 344: mod_base = OTHER; note = N1-methylpseudouracil
  modified_base 350: mod_base = OTHER; note = N1-methylpseudouracil
  modified_base 377: mod_base = OTHER; note = N1-methylpseudouracil
  modified_base 380: mod_base = OTHER; note = N1-methylpseudouracil
  modified_base 386: mod_base = OTHER; note = N1-methylpseudouracil
  modified_base 393: mod_base = OTHER; note = N1-methylpseudouracil
  modified_base 401: mod_base = OTHER; note = N1-methylpseudouracil
  modified_base 404: mod_base = OTHER; note = N1-methylpseudouracil
  modified_base 405: mod_base = OTHER; note = N1-methylpseudouracil
  modified_base 406: mod_base = OTHER; note = N1-methylpseudouracil
  modified_base 407: mod_base = OTHER; note = N1-methylpseudouracil
  modified_base 413: mod_base = OTHER; note = N1-methylpseudouracil
  modified_base 420: mod_base = OTHER; note = N1-methylpseudouracil
  modified_base 437: mod_base = OTHER; note = N1-methylpseudouracil
  modified_base 443: mod_base = OTHER; note = N1-methylpseudouracil
  modified_base 449: mod_base = OTHER; note = N1-methylpseudouracil
  modified_base 466: mod_base = OTHER; note = N1-methylpseudouracil
  modified_base 471: mod_base = OTHER; note = N1-methylpseudouracil
  modified_base 473: mod_base = OTHER; note = N1-methylpseudouracil
  modified_base 479: mod_base = OTHER; note = N1-methylpseudouracil
  modified_base 481: mod_base = OTHER; note = N1-methylpseudouracil
  modified_base 484: mod_base = OTHER; note = N1-methylpseudouracil
  modified_base 488: mod_base = OTHER; note = N1-methylpseudouracil
  modified_base 491: mod_base = OTHER; note = N1-methylpseudouracil
  modified_base 497: mod_base = OTHER; note = N1-methylpseudouracil
  modified_base 509: mod_base = OTHER; note = N1-methylpseudouracil
  modified_base 521: mod_base = OTHER; note = N1-methylpseudouracil
  modified_base 530: mod_base = OTHER; note = N1-methylpseudouracil
  modified_base 539: mod_base = OTHER; note = N1-methylpseudouracil
  modified_base 551: mod_base = OTHER; note = N1-methylpseudouracil
  modified_base 563: mod_base = OTHER; note = N1-methylpseudouracil
  modified_base 572: mod_base = OTHER; note = N1-methylpseudouracil
  modified_base 583: mod_base = OTHER; note = N1-methylpseudouracil
  modified_base 584: mod_base = OTHER; note = N1-methylpseudouracil
  modified_base 590: mod_base = OTHER; note = N1-methylpseudouracil
  modified_base 595: mod_base = OTHER; note = N1-methylpseudouracil
  modified_base 596: mod_base = OTHER; note = N1-methylpseudouracil
  modified_base 604: mod_base = OTHER; note = N1-methylpseudouracil
  modified_base 605: mod_base = OTHER; note = N1-methylpseudouracil
  modified_base 608: mod_base = OTHER; note = N1-methylpseudouracil
  modified_base 618: mod_base = OTHER; note = N1-methylpseudouracil
  modified_base 620: mod_base = OTHER; note = N1-methylpseudouracil
  modified_base 622: mod_base = OTHER; note = N1-methylpseudouracil
  modified_base 627: mod_base = OTHER; note = N1-methylpseudouracil
  modified_base 628: mod_base = OTHER; note = N1-methylpseudouracil
  modified_base 629: mod_base = OTHER; note = N1-methylpseudouracil
  modified_base 632: mod_base = OTHER; note = N1-methylpseudouracil
  modified_base 645: mod_base = OTHER; note = N1-methylpseudouracil
  modified_base 653: mod_base = OTHER; note = N1-methylpseudouracil
  modified_base 663: mod_base = OTHER; note = N1-methylpseudouracil
  modified_base 664: mod_base = OTHER; note = N1-methylpseudouracil
  modified_base 674: mod_base = OTHER; note = N1-methylpseudouracil
  modified_base 678: mod_base = OTHER; note = N1-methylpseudouracil
  modified_base 679: mod_base = OTHER; note = N1-methylpseudouracil
  modified_base 682: mod_base = OTHER; note = N1-methylpseudouracil
  modified_base 683: mod_base = OTHER; note = N1-methylpseudouracil
  modified_base 685: mod_base = OTHER; note = N1-methylpseudouracil
  modified_base 689: mod_base = OTHER; note = N1-methylpseudouracil
  modified_base 693: mod_base = OTHER; note = N1-methylpseudouracil
  modified_base 697: mod_base = OTHER; note = N1-methylpseudouracil
  modified_base 698: mod_base = OTHER; note = N1-methylpseudouracil
  modified_base 703: mod_base = OTHER; note = N1-methylpseudouracil
  modified_base 704: mod_base = OTHER; note = N1-methylpseudouracil
  modified_base 713: mod_base = OTHER; note = N1-methylpseudouracil
  modified_base 716: mod_base = OTHER; note = N1-methylpseudouracil
  modified_base 720: mod_base = OTHER; note = N1-methylpseudouracil
  modified_base 722: mod_base = OTHER; note = N1-methylpseudouracil
  modified_base 742: mod_base = OTHER; note = N1-methylpseudouracil
  modified_base 743: mod_base = OTHER; note = N1-methylpseudouracil
  modified_base 752: mod_base = OTHER; note = N1-methylpseudouracil
  modified_base 755: mod_base = OTHER; note = N1-methylpseudouracil
  modified_base 756: mod_base = OTHER; note = N1-methylpseudouracil
  modified_base 770: mod_base = OTHER; note = N1-methylpseudouracil
  modified_base 782: mod_base = OTHER; note = N1-methylpseudouracil
  modified_base 786: mod_base = OTHER; note = N1-methylpseudouracil
  modified_base 789: mod_base = OTHER; note = N1-methylpseudouracil
  modified_base 801: mod_base = OTHER; note = N1-methylpseudouracil
  modified_base 802: mod_base = OTHER; note = N1-methylpseudouracil
  modified_base 803: mod_base = OTHER; note = N1-methylpseudouracil
  modified_base 812: mod_base = OTHER; note = N1-methylpseudouracil
  modified_base 815: mod_base = OTHER; note = N1-methylpseudouracil
  modified_base 827: mod_base = OTHER; note = N1-methylpseudouracil
  modified_base 829: mod_base = OTHER; note = N1-methylpseudouracil
  modified_base 831: mod_base = OTHER; note = N1-methylpseudouracil
  modified_base 842: mod_base = OTHER; note = N1-methylpseudouracil
  modified_base 847: mod_base = OTHER; note = N1-methylpseudouracil
  modified_base 863: mod_base = OTHER; note = N1-methylpseudouracil
  modified_base 867: mod_base = OTHER; note = N1-methylpseudouracil
  modified_base 869: mod_base = OTHER; note = N1-methylpseudouracil
  modified_base 870: mod_base = OTHER; note = N1-methylpseudouracil
  modified_base 871: mod_base = OTHER; note = N1-methylpseudouracil
  modified_base 872: mod_base = OTHER; note = N1-methylpseudouracil
  modified_base 875: mod_base = OTHER; note = N1-methylpseudouracil
  modified_base 877: mod_base = OTHER; note = N1-methylpseudouracil
  modified_base 878: mod_base = OTHER; note = N1-methylpseudouracil
  modified_base 881: mod_base = OTHER; note = N1-methylpseudouracil
  modified_base 885: mod_base = OTHER; note = N1-methylpseudouracil
  modified_base 901: mod_base = OTHER; note = N1-methylpseudouracil
  modified_base 902: mod_base = OTHER; note = N1-methylpseudouracil
  modified_base 908: mod_base = OTHER; note = N1-methylpseudouracil
  modified_base 913: mod_base = OTHER; note = N1-methylpseudouracil
  modified_base 915: mod_base = OTHER; note = N1-methylpseudouracil
  modified_base 919: mod_base = OTHER; note = N1-methylpseudouracil
  modified_base 920: mod_base = OTHER; note = N1-methylpseudouracil
  modified_base 929: mod_base = OTHER; note = N1-methylpseudouracil
  modified_base 932: mod_base = OTHER; note = N1-methylpseudouracil
  modified_base 935: mod_base = OTHER; note = N1-methylpseudouracil
  modified_base 939: mod_base = OTHER; note = N1-methylpseudouracil
  modified_base 950: mod_base = OTHER; note = N1-methylpseudouracil
  modified_base 952: mod_base = OTHER; note = N1-methylpseudouracil
  modified_base 959: mod_base = OTHER; note = N1-methylpseudouracil
  modified_base 976: mod_base = OTHER; note = N1-methylpseudouracil
  modified_base 983: mod_base = OTHER; note = N1-methylpseudouracil
  modified_base 992: mod_base = OTHER; note = N1-methylpseudouracil
  modified_base 995: mod_base = OTHER; note = N1-methylpseudouracil
  modified_base 1000: mod_base = OTHER; note = N1-methylpseudouracil
  modified_base 1005: mod_base = OTHER; note = N1-methylpseudouracil
  modified_base 1010: mod_base = OTHER; note = N1-methylpseudouracil
  modified_base 1014: mod_base = OTHER; note = N1-methylpseudouracil
  modified_base 1019: mod_base = OTHER; note = N1-methylpseudouracil
  modified_base 1022: mod_base = OTHER; note = N1-methylpseudouracil
  modified_base 1031: mod_base = OTHER; note = N1-methylpseudouracil
  modified_base 1034: mod_base = OTHER; note = N1-methylpseudouracil
  modified_base 1046: mod_base = OTHER; note = N1-methylpseudouracil
  modified_base 1049: mod_base = OTHER; note = N1-methylpseudouracil
  modified_base 1052: mod_base = OTHER; note = N1-methylpseudouracil
  modified_base 1055: mod_base = OTHER; note = N1-methylpseudouracil
  modified_base 1057: mod_base = OTHER; note = N1-methylpseudouracil
  modified_base 1058: mod_base = OTHER; note = N1-methylpseudouracil
  modified_base 1064: mod_base = OTHER; note = N1-methylpseudouracil
  modified_base 1079: mod_base = OTHER; note = N1-methylpseudouracil
  modified_base 1085: mod_base = OTHER; note = N1-methylpseudouracil
  modified_base 1087: mod_base = OTHER; note = N1-methylpseudouracil
  modified_base 1096: mod_base = OTHER; note = N1-methylpseudouracil
  modified_base 1106: mod_base = OTHER; note = N1-methylpseudouracil
  modified_base 1109: mod_base = OTHER; note = N1-methylpseudouracil
  modified_base 1113: mod_base = OTHER; note = N1-methylpseudouracil
  modified_base 1124: mod_base = OTHER; note = N1-methylpseudouracil
  modified_base 1130: mod_base = OTHER; note = N1-methylpseudouracil
  modified_base 1133: mod_base = OTHER; note = N1-methylpseudouracil
  modified_base 1152: mod_base = OTHER; note = N1-methylpseudouracil
  modified_base 1154: mod_base = OTHER; note = N1-methylpseudouracil
  modified_base 1156: mod_base = OTHER; note = N1-methylpseudouracil
  modified_base 1157: mod_base = OTHER; note = N1-methylpseudouracil
  modified_base 1162: mod_base = OTHER; note = N1-methylpseudouracil
  modified_base 1163: mod_base = OTHER; note = N1-methylpseudouracil
  modified_base 1166: mod_base = OTHER; note = N1-methylpseudouracil
  modified_base 1167: mod_base = OTHER; note = N1-methylpseudouracil
  modified_base 1169: mod_base = OTHER; note = N1-methylpseudouracil
  modified_base 1170: mod_base = OTHER; note = N1-methylpseudouracil
  modified_base 1171: mod_base = OTHER; note = N1-methylpseudouracil
  modified_base 1177: mod_base = OTHER; note = N1-methylpseudouracil
  modified_base 1187: mod_base = OTHER; note = N1-methylpseudouracil
  modified_base 1199: mod_base = OTHER; note = N1-methylpseudouracil
  modified_base 1205: mod_base = OTHER; note = N1-methylpseudouracil
  modified_base 1211: mod_base = OTHER; note = N1-methylpseudouracil
  modified_base 1214: mod_base = OTHER; note = N1-methylpseudouracil
  modified_base 1232: mod_base = OTHER; note = N1-methylpseudouracil
  modified_base 1238: mod_base = OTHER; note = N1-methylpseudouracil
  modified_base 1243: mod_base = OTHER; note = N1-methylpseudouracil
  modified_base 1244: mod_base = OTHER; note = N1-methylpseudouracil
  modified_base 1253: mod_base = OTHER; note = N1-methylpseudouracil
  modified_base 1255: mod_base = OTHER; note = N1-methylpseudouracil
  modified_base 1271: mod_base = OTHER; note = N1-methylpseudouracil
  modified_base 1273: mod_base = OTHER; note = N1-methylpseudouracil
  modified_base 1274: mod_base = OTHER; note = N1-methylpseudouracil
  modified_base 1281: mod_base = OTHER; note = N1-methylpseudouracil
  modified_base 1291: mod_base = OTHER; note = N1-methylpseudouracil
  modified_base 1301: mod_base = OTHER; note = N1-methylpseudouracil
  modified_base 1307: mod_base = OTHER; note = N1-methylpseudouracil
  modified_base 1314: mod_base = OTHER; note = N1-methylpseudouracil
  modified_base 1324: mod_base = OTHER; note = N1-methylpseudouracil
  modified_base 1325: mod_base = OTHER; note = N1-methylpseudouracil
  modified_base 1331: mod_base = OTHER; note = N1-methylpseudouracil
  modified_base 1337: mod_base = OTHER; note = N1-methylpseudouracil
  modified_base 1343: mod_base = OTHER; note = N1-methylpseudouracil
  modified_base 1347: mod_base = OTHER; note = N1-methylpseudouracil
  modified_base 1351: mod_base = OTHER; note = N1-methylpseudouracil
  modified_base 1373: mod_base = OTHER; note = N1-methylpseudouracil
  modified_base 1376: mod_base = OTHER; note = N1-methylpseudouracil
  modified_base 1379: mod_base = OTHER; note = N1-methylpseudouracil
  modified_base 1386: mod_base = OTHER; note = N1-methylpseudouracil
  modified_base 1388: mod_base = OTHER; note = N1-methylpseudouracil
  modified_base 1394: mod_base = OTHER; note = N1-methylpseudouracil
  modified_base 1395: mod_base = OTHER; note = N1-methylpseudouracil
  modified_base 1398: mod_base = OTHER; note = N1-methylpseudouracil
  modified_base 1406: mod_base = OTHER; note = N1-methylpseudouracil
  modified_base 1412: mod_base = OTHER; note = N1-methylpseudouracil
  modified_base 1415: mod_base = OTHER; note = N1-methylpseudouracil
  modified_base 1418: mod_base = OTHER; note = N1-methylpseudouracil
  modified_base 1420: mod_base = OTHER; note = N1-methylpseudouracil
  modified_base 1429: mod_base = OTHER; note = N1-methylpseudouracil
  modified_base 1435: mod_base = OTHER; note = N1-methylpseudouracil
  modified_base 1441: mod_base = OTHER; note = N1-methylpseudouracil
  modified_base 1443: mod_base = OTHER; note = N1-methylpseudouracil
  modified_base 1454: mod_base = OTHER; note = N1-methylpseudouracil
  modified_base 1460: mod_base = OTHER; note = N1-methylpseudouracil
  modified_base 1461: mod_base = OTHER; note = N1-methylpseudouracil
  modified_base 1465: mod_base = OTHER; note = N1-methylpseudouracil
  modified_base 1467: mod_base = OTHER; note = N1-methylpseudouracil
  modified_base 1468: mod_base = OTHER; note = N1-methylpseudouracil
  modified_base 1470: mod_base = OTHER; note = N1-methylpseudouracil
  modified_base 1474: mod_base = OTHER; note = N1-methylpseudouracil
  modified_base 1494: mod_base = OTHER; note = N1-methylpseudouracil
  modified_base 1495: mod_base = OTHER; note = N1-methylpseudouracil
  modified_base 1496: mod_base = OTHER; note = N1-methylpseudouracil
  modified_base 1501: mod_base = OTHER; note = N1-methylpseudouracil
  modified_base 1508: mod_base = OTHER; note = N1-methylpseudouracil
  modified_base 1510: mod_base = OTHER; note = N1-methylpseudouracil
  modified_base 1512: mod_base = OTHER; note = N1-methylpseudouracil
  modified_base 1516: mod_base = OTHER; note = N1-methylpseudouracil
  modified_base 1524: mod_base = OTHER; note = N1-methylpseudouracil
  modified_base 1532: mod_base = OTHER; note = N1-methylpseudouracil
  modified_base 1539: mod_base = OTHER; note = N1-methylpseudouracil
  modified_base 1543: mod_base = OTHER; note = N1-methylpseudouracil
  modified_base 1549: mod_base = OTHER; note = N1-methylpseudouracil
  modified_base 1562: mod_base = OTHER; note = N1-methylpseudouracil
  modified_base 1565: mod_base = OTHER; note = N1-methylpseudouracil
  modified_base 1567: mod_base = OTHER; note = N1-methylpseudouracil
  modified_base 1569: mod_base = OTHER; note = N1-methylpseudouracil
  modified_base 1572: mod_base = OTHER; note = N1-methylpseudouracil
  modified_base 1579: mod_base = OTHER; note = N1-methylpseudouracil
  modified_base 1581: mod_base = OTHER; note = N1-methylpseudouracil
  modified_base 1593: mod_base = OTHER; note = N1-methylpseudouracil
  modified_base 1599: mod_base = OTHER; note = N1-methylpseudouracil
  modified_base 1605: mod_base = OTHER; note = N1-methylpseudouracil
  modified_base 1606: mod_base = OTHER; note = N1-methylpseudouracil
  modified_base 1608: mod_base = OTHER; note = N1-methylpseudouracil
  modified_base 1624: mod_base = OTHER; note = N1-methylpseudouracil
  modified_base 1627: mod_base = OTHER; note = N1-methylpseudouracil
  modified_base 1630: mod_base = OTHER; note = N1-methylpseudouracil
  modified_base 1639: mod_base = OTHER; note = N1-methylpseudouracil
  modified_base 1643: mod_base = OTHER; note = N1-methylpseudouracil
  modified_base 1645: mod_base = OTHER; note = N1-methylpseudouracil
  modified_base 1650: mod_base = OTHER; note = N1-methylpseudouracil
  modified_base 1652: mod_base = OTHER; note = N1-methylpseudouracil
  modified_base 1654: mod_base = OTHER; note = N1-methylpseudouracil
  modified_base 1656: mod_base = OTHER; note = N1-methylpseudouracil
  modified_base 1660: mod_base = OTHER; note = N1-methylpseudouracil
  modified_base 1668: mod_base = OTHER; note = N1-methylpseudouracil
  modified_base 1670: mod_base = OTHER; note = N1-methylpseudouracil
  modified_base 1672: mod_base = OTHER; note = N1-methylpseudouracil
  modified_base 1680: mod_base = OTHER; note = N1-methylpseudouracil
  modified_base 1681: mod_base = OTHER; note = N1-methylpseudouracil
  modified_base 1684: mod_base = OTHER; note = N1-methylpseudouracil
  modified_base 1690: mod_base = OTHER; note = N1-methylpseudouracil
  modified_base 1698: mod_base = OTHER; note = N1-methylpseudouracil
  modified_base 1699: mod_base = OTHER; note = N1-methylpseudouracil
  modified_base 1700: mod_base = OTHER; note = N1-methylpseudouracil
  modified_base 1705: mod_base = OTHER; note = N1-methylpseudouracil
  modified_base 1709: mod_base = OTHER; note = N1-methylpseudouracil
  modified_base 1710: mod_base = OTHER; note = N1-methylpseudouracil
  modified_base 1722: mod_base = OTHER; note = N1-methylpseudouracil
  modified_base 1724: mod_base = OTHER; note = N1-methylpseudouracil
  modified_base 1725: mod_base = OTHER; note = N1-methylpseudouracil
  modified_base 1727: mod_base = OTHER; note = N1-methylpseudouracil
  modified_base 1729: mod_base = OTHER; note = N1-methylpseudouracil
  modified_base 1731: mod_base = OTHER; note = N1-methylpseudouracil
  modified_base 1746: mod_base = OTHER; note = N1-methylpseudouracil
  modified_base 1747: mod_base = OTHER; note = N1-methylpseudouracil
  modified_base 1749: mod_base = OTHER; note = N1-methylpseudouracil
  modified_base 1752: mod_base = OTHER; note = N1-methylpseudouracil
  modified_base 1753: mod_base = OTHER; note = N1-methylpseudouracil
  modified_base 1758: mod_base = OTHER; note = N1-methylpseudouracil
  modified_base 1762: mod_base = OTHER; note = N1-methylpseudouracil
  modified_base 1766: mod_base = OTHER; note = N1-methylpseudouracil
  modified_base 1768: mod_base = OTHER; note = N1-methylpseudouracil
  modified_base 1780: mod_base = OTHER; note = N1-methylpseudouracil
  modified_base 1792: mod_base = OTHER; note = N1-methylpseudouracil
  modified_base 1795: mod_base = OTHER; note = N1-methylpseudouracil
  modified_base 1800: mod_base = OTHER; note = N1-methylpseudouracil
  modified_base 1801: mod_base = OTHER; note = N1-methylpseudouracil
  modified_base 1810: mod_base = OTHER; note = N1-methylpseudouracil
  modified_base 1815: mod_base = OTHER; note = N1-methylpseudouracil
  modified_base 1822: mod_base = OTHER; note = N1-methylpseudouracil
  modified_base 1826: mod_base = OTHER; note = N1-methylpseudouracil
  modified_base 1841: mod_base = OTHER; note = N1-methylpseudouracil
  modified_base 1844: mod_base = OTHER; note = N1-methylpseudouracil
  modified_base 1846: mod_base = OTHER; note = N1-methylpseudouracil
  modified_base 1864: mod_base = OTHER; note = N1-methylpseudouracil
  modified_base 1866: mod_base = OTHER; note = N1-methylpseudouracil
  modified_base 1868: mod_base = OTHER; note = N1-methylpseudouracil
  modified_base 1869: mod_base = OTHER; note = N1-methylpseudouracil
  modified_base 1870: mod_base = OTHER; note = N1-methylpseudouracil
  modified_base 1879: mod_base = OTHER; note = N1-methylpseudouracil
  modified_base 1881: mod_base = OTHER; note = N1-methylpseudouracil
  modified_base 1883: mod_base = OTHER; note = N1-methylpseudouracil
  modified_base 1885: mod_base = OTHER; note = N1-methylpseudouracil
  modified_base 1893: mod_base = OTHER; note = N1-methylpseudouracil
  modified_base 1896: mod_base = OTHER; note = N1-methylpseudouracil
  modified_base 1899: mod_base = OTHER; note = N1-methylpseudouracil
  modified_base 1902: mod_base = OTHER; note = N1-methylpseudouracil
  modified_base 1911: mod_base = OTHER; note = N1-methylpseudouracil
  modified_base 1914: mod_base = OTHER; note = N1-methylpseudouracil
  modified_base 1915: mod_base = OTHER; note = N1-methylpseudouracil
  modified_base 1924: mod_base = OTHER; note = N1-methylpseudouracil
  modified_base 1933: mod_base = OTHER; note = N1-methylpseudouracil
  modified_base 1935: mod_base = OTHER; note = N1-methylpseudouracil
  modified_base 1945: mod_base = OTHER; note = N1-methylpseudouracil
  modified_base 1951: mod_base = OTHER; note = N1-methylpseudouracil
  modified_base 1963: mod_base = OTHER; note = N1-methylpseudouracil
  modified_base 1967: mod_base = OTHER; note = N1-methylpseudouracil
  modified_base 1972: mod_base = OTHER; note = N1-methylpseudouracil
  modified_base 1974: mod_base = OTHER; note = N1-methylpseudouracil
  modified_base 1979: mod_base = OTHER; note = N1-methylpseudouracil
  modified_base 1981: mod_base = OTHER; note = N1-methylpseudouracil
  modified_base 1986: mod_base = OTHER; note = N1-methylpseudouracil
  modified_base 2008: mod_base = OTHER; note = N1-methylpseudouracil
  modified_base 2010: mod_base = OTHER; note = N1-methylpseudouracil
  modified_base 2012: mod_base = OTHER; note = N1-methylpseudouracil
  modified_base 2013: mod_base = OTHER; note = N1-methylpseudouracil
  modified_base 2020: mod_base = OTHER; note = N1-methylpseudouracil
  modified_base 2026: mod_base = OTHER; note = N1-methylpseudouracil
  modified_base 2027: mod_base = OTHER; note = N1-methylpseudouracil
  modified_base 2031: mod_base = OTHER; note = N1-methylpseudouracil
  modified_base 2042: mod_base = OTHER; note = N1-methylpseudouracil
  modified_base 2059: mod_base = OTHER; note = N1-methylpseudouracil
  modified_base 2060: mod_base = OTHER; note = N1-methylpseudouracil
  modified_base 2078: mod_base = OTHER; note = N1-methylpseudouracil
  modified_base 2083: mod_base = OTHER; note = N1-methylpseudouracil
  modified_base 2085: mod_base = OTHER; note = N1-methylpseudouracil
  modified_base 2088: mod_base = OTHER; note = N1-methylpseudouracil
  modified_base 2090: mod_base = OTHER; note = N1-methylpseudouracil
  modified_base 2107: mod_base = OTHER; note = N1-methylpseudouracil
  modified_base 2111: mod_base = OTHER; note = N1-methylpseudouracil
  modified_base 2114: mod_base = OTHER; note = N1-methylpseudouracil
  modified_base 2119: mod_base = OTHER; note = N1-methylpseudouracil
  modified_base 2120: mod_base = OTHER; note = N1-methylpseudouracil
  modified_base 2123: mod_base = OTHER; note = N1-methylpseudouracil
  modified_base 2126: mod_base = OTHER; note = N1-methylpseudouracil
  modified_base 2127: mod_base = OTHER; note = N1-methylpseudouracil
  modified_base 2130: mod_base = OTHER; note = N1-methylpseudouracil
  modified_base 2153: mod_base = OTHER; note = N1-methylpseudouracil
  modified_base 2156: mod_base = OTHER; note = N1-methylpseudouracil
  modified_base 2161: mod_base = OTHER; note = N1-methylpseudouracil
  modified_base 2165: mod_base = OTHER; note = N1-methylpseudouracil
  modified_base 2179: mod_base = OTHER; note = N1-methylpseudouracil
  modified_base 2181: mod_base = OTHER; note = N1-methylpseudouracil
  modified_base 2184: mod_base = OTHER; note = N1-methylpseudouracil
  modified_base 2190: mod_base = OTHER; note = N1-methylpseudouracil
  modified_base 2193: mod_base = OTHER; note = N1-methylpseudouracil
  modified_base 2196: mod_base = OTHER; note = N1-methylpseudouracil
  modified_base 2198: mod_base = OTHER; note = N1-methylpseudouracil
  modified_base 2202: mod_base = OTHER; note = N1-methylpseudouracil
  modified_base 2204: mod_base = OTHER; note = N1-methylpseudouracil
  modified_base 2207: mod_base = OTHER; note = N1-methylpseudouracil
  modified_base 2210: mod_base = OTHER; note = N1-methylpseudouracil
  modified_base 2213: mod_base = OTHER; note = N1-methylpseudouracil
  modified_base 2214: mod_base = OTHER; note = N1-methylpseudouracil
  modified_base 2219: mod_base = OTHER; note = N1-methylpseudouracil
  modified_base 2225: mod_base = OTHER; note = N1-methylpseudouracil
  modified_base 2231: mod_base = OTHER; note = N1-methylpseudouracil
  modified_base 2232: mod_base = OTHER; note = N1-methylpseudouracil
  modified_base 2234: mod_base = OTHER; note = N1-methylpseudouracil
  modified_base 2235: mod_base = OTHER; note = N1-methylpseudouracil
  modified_base 2237: mod_base = OTHER; note = N1-methylpseudouracil
  modified_base 2240: mod_base = OTHER; note = N1-methylpseudouracil
  modified_base 2241: mod_base = OTHER; note = N1-methylpseudouracil
  modified_base 2246: mod_base = OTHER; note = N1-methylpseudouracil
  modified_base 2249: mod_base = OTHER; note = N1-methylpseudouracil
  modified_base 2252: mod_base = OTHER; note = N1-methylpseudouracil
  modified_base 2255: mod_base = OTHER; note = N1-methylpseudouracil
  modified_base 2257: mod_base = OTHER; note = N1-methylpseudouracil
  modified_base 2259: mod_base = OTHER; note = N1-methylpseudouracil
  modified_base 2261: mod_base = OTHER; note = N1-methylpseudouracil
  modified_base 2262: mod_base = OTHER; note = N1-methylpseudouracil
  modified_base 2263: mod_base = OTHER; note = N1-methylpseudouracil
  modified_base 2270: mod_base = OTHER; note = N1-methylpseudouracil
  modified_base 2273: mod_base = OTHER; note = N1-methylpseudouracil
  modified_base 2276: mod_base = OTHER; note = N1-methylpseudouracil
  modified_base 2281: mod_base = OTHER; note = N1-methylpseudouracil
  modified_base 2282: mod_base = OTHER; note = N1-methylpseudouracil
  modified_base 2300: mod_base = OTHER; note = N1-methylpseudouracil
  modified_base 2301: mod_base = OTHER; note = N1-methylpseudouracil
  modified_base 2308: mod_base = OTHER; note = N1-methylpseudouracil
  modified_base 2309: mod_base = OTHER; note = N1-methylpseudouracil
  modified_base 2335: mod_base = OTHER; note = N1-methylpseudouracil
  modified_base 2349: mod_base = OTHER; note = N1-methylpseudouracil
  modified_base 2355: mod_base = OTHER; note = N1-methylpseudouracil
  modified_base 2357: mod_base = OTHER; note = N1-methylpseudouracil
  modified_base 2359: mod_base = OTHER; note = N1-methylpseudouracil
  modified_base 2370: mod_base = OTHER; note = N1-methylpseudouracil
  modified_base 2376: mod_base = OTHER; note = N1-methylpseudouracil
  modified_base 2380: mod_base = OTHER; note = N1-methylpseudouracil
  modified_base 2381: mod_base = OTHER; note = N1-methylpseudouracil
  modified_base 2390: mod_base = OTHER; note = N1-methylpseudouracil
  modified_base 2395: mod_base = OTHER; note = N1-methylpseudouracil
  modified_base 2420: mod_base = OTHER; note = N1-methylpseudouracil
  modified_base 2424: mod_base = OTHER; note = N1-methylpseudouracil
  modified_base 2426: mod_base = OTHER; note = N1-methylpseudouracil
  modified_base 2427: mod_base = OTHER; note = N1-methylpseudouracil
  modified_base 2428: mod_base = OTHER; note = N1-methylpseudouracil
  modified_base 2430: mod_base = OTHER; note = N1-methylpseudouracil
  modified_base 2437: mod_base = OTHER; note = N1-methylpseudouracil
  modified_base 2442: mod_base = OTHER; note = N1-methylpseudouracil
  modified_base 2448: mod_base = OTHER; note = N1-methylpseudouracil
  modified_base 2450: mod_base = OTHER; note = N1-methylpseudouracil
  modified_base 2454: mod_base = OTHER; note = N1-methylpseudouracil
  modified_base 2457: mod_base = OTHER; note = N1-methylpseudouracil
  modified_base 2462: mod_base = OTHER; note = N1-methylpseudouracil
  modified_base 2464: mod_base = OTHER; note = N1-methylpseudouracil
  modified_base 2465: mod_base = OTHER; note = N1-methylpseudouracil
  modified_base 2469: mod_base = OTHER; note = N1-methylpseudouracil
  modified_base 2470: mod_base = OTHER; note = N1-methylpseudouracil
  modified_base 2471: mod_base = OTHER; note = N1-methylpseudouracil
  modified_base 2475: mod_base = OTHER; note = N1-methylpseudouracil
  modified_base 2476: mod_base = OTHER; note = N1-methylpseudouracil
  modified_base 2482: mod_base = OTHER; note = N1-methylpseudouracil
  modified_base 2490: mod_base = OTHER; note = N1-methylpseudouracil
  modified_base 2500: mod_base = OTHER; note = N1-methylpseudouracil
  modified_base 2504: mod_base = OTHER; note = N1-methylpseudouracil
  modified_base 2509: mod_base = OTHER; note = N1-methylpseudouracil
  modified_base 2513: mod_base = OTHER; note = N1-methylpseudouracil
  modified_base 2514: mod_base = OTHER; note = N1-methylpseudouracil
  modified_base 2516: mod_base = OTHER; note = N1-methylpseudouracil
  modified_base 2517: mod_base = OTHER; note = N1-methylpseudouracil
  modified_base 2523: mod_base = OTHER; note = N1-methylpseudouracil
  modified_base 2524: mod_base = OTHER; note = N1-methylpseudouracil
  modified_base 2530: mod_base = OTHER; note = N1-methylpseudouracil
  modified_base 2543: mod_base = OTHER; note = N1-methylpseudouracil
  modified_base 2546: mod_base = OTHER; note = N1-methylpseudouracil
  modified_base 2551: mod_base = OTHER; note = N1-methylpseudouracil
  modified_base 2552: mod_base = OTHER; note = N1-methylpseudouracil
  modified_base 2555: mod_base = OTHER; note = N1-methylpseudouracil
  modified_base 2563: mod_base = OTHER; note = N1-methylpseudouracil
  modified_base 2579: mod_base = OTHER; note = N1-methylpseudouracil
  modified_base 2580: mod_base = OTHER; note = N1-methylpseudouracil
  modified_base 2582: mod_base = OTHER; note = N1-methylpseudouracil
  modified_base 2588: mod_base = OTHER; note = N1-methylpseudouracil
  modified_base 2593: mod_base = OTHER; note = N1-methylpseudouracil
  modified_base 2596: mod_base = OTHER; note = N1-methylpseudouracil
  modified_base 2598: mod_base = OTHER; note = N1-methylpseudouracil
  modified_base 2599: mod_base = OTHER; note = N1-methylpseudouracil
  modified_base 2600: mod_base = OTHER; note = N1-methylpseudouracil
  modified_base 2604: mod_base = OTHER; note = N1-methylpseudouracil
  modified_base 2609: mod_base = OTHER; note = N1-methylpseudouracil
  modified_base 2611: mod_base = OTHER; note = N1-methylpseudouracil
  modified_base 2615: mod_base = OTHER; note = N1-methylpseudouracil
ggaaatcgcaaaatttgctcttcgcgttagatttcttttagttttctcgcaactagcaagctttttgttctcgccatgggcatcgagctgctgtgcctgttcttcctgttcctgggcagaaacgaccacgtgcagggaggttgcgccctcggaggtgccgagacatgcgaggactgcctgctgatcggccctcagtgcgcctggtgcgcccaggagaacttcacccaccctagcggcgtgggcgagaggtgcgacacccctgccaacctgctggccaagggctgccagctgaacttcatcgagaaccctgtgagccaggtggagatcctgaagaacaagcctctgagcgtgggcagacagaagaacagcagcgacatcgtgcagatcgcccctcagagcctgattttgaagctccggcctggaggagcacagaccctgcaggtgcacgtgagacagaccgaggactaccctgtggacctgtactacctgatggacctgagcgccagcatggacgacgacctgaacaccatcaaggagctgggcagcagactgagcaaggagatgagcaagctgaccagcaacttcagactgggcttcggcagcttcgtggagaagcctgtatcgcctttcgtgaagaccacccctgaggagatcgccaacccttgcagcagcatcccttacttctgcctgcctaccttcggcttcaagcacatcctgcctctgaccaacgacgccgagagattcaacgagatagttaagaaccagaagatcagcgccaacatagatactccagaaggaggtttcgacgccatcatgcaggccgccgtgtgtaaggagaagatcggctggcggaacgacagcctgcatcttttggtgttcgtgagtgacgcagacagccacttcggcatggactctaagttagccggcatcgtgatccctaacgacggcctgtgccacctggacagcaagaacgagtacagcatgagcaccgtgctggagtaccctaccatcggtcagctgatcgacaagctggtgcagaacaacgtgctgctaatcttcgccgtgacccaggaacaagtccacctgtacgagaactacgccaagctgatccctggcgccaccgtgggcctgctgcagaaggacagcggcaatatcttgcagttgattatttccgcatacgaggagctgagaagcgaggtggagctggaggtgctgggcgacaccgagggcctgaacctgagcttcaccgccatctgcaacaacggcaccctgttccagcatcagaagaagtgcagccacatgaaggtgggcgatacagccagcttcagcgtgaccgtgaacatccctcactgcgagagaagaagcagacacatcatcatcaagcctgtgggccttggtgacgccctggaactgctggtatcaccagagtgcaactgcgactgtcagaaggaagtggaggttaactcttctaagtgccaccacggcaacggaagtttccagtgcggcgtctgtgcgtgccaccctggccacatgggccctcgatgcgagtgcggagaggacatgctctctactgacagctgtaaggaggcccctgaccatccgagttgtagcggcagaggcgactgctactgcggccagtgcatctgccatctatctccatacggaaatatctacggcccttactgccagtgcgacaatttcagctgcgttagacacaagggtcttctgtgtggaggaaacggcgattgtgattgcggtgagtgcgtgtgcagaagcggctggaccggcgagtactgcaattgcaccacctccactgacagctgcgtgagcgaggacggcgtgctgtgcagcggacggggcgactgtgtttgcggcaagtgtgtgtgcaccaatcctggtgctagcggccctacttgcgaaaggtgcccaacctgtggcgacccgtgcaactccaagagaagctgcatcgagtgtcacctatcagctgccggccaggccagagaggagtgtgttgacaagtgcaagttagctggagcaacaatcagcgaggaggaggacttcagcaaggacggcagcgtgagctgtagtctccaaggcgagaacgagtgcctgatcaccttcctgattactaccgacaacgagggcaagaccatcatccactccatcaacgagaaggactgtcctaagcctcctaatatccctatgatcatgcttggcgtgagcctggccattcttctgattggagtggtgctgctctgtatttggaagctactggtgagcttccacgacagaaaggaagttgccaagttcgaggcggaaaggagcaaggccaagtggcagaccggcactaaccctctgtacagaggaagtaccagtacattcaagaacgtgacctacaagcacagagagaagcagaaggtggatctttctacagactgcggtaagcctatccctaatccactgttgggtttggattccacctaagcccctccgggggcctcggtggcctagcttcttgccccttgggcctccccccagcccctcctccccttcctgcacccgtaccccccaaacaccattgtcacactccagtggtctttgaataaagtctgagtgggcggc

SEQ ID NO: 163 - RNA, 2622 nt, unidentified
  source 1..2622: mol_type = unassigned RNA
  modified_base 6: mod_base = OTHER; note = N1-methylpseudouracil
  modified_base 14: mod_base = OTHER; note = N1-methylpseudouracil
  modified_base 15: mod_base = OTHER; note = N1-methylpseudouracil
  modified_base 16: mod_base = OTHER; note = N1-methylpseudouracil
  modified_base 19: mod_base = OTHER; note = N1-methylpseudouracil
  modified_base 21: mod_base = OTHER; note = N1-methylpseudouracil
  modified_base 22: mod_base = OTHER; note = N1-methylpseudouracil
  modified_base 27: mod_base = OTHER; note = N1-methylpseudouracil
  modified_base 28: mod_base = OTHER; note = N1-methylpseudouracil
  modified_base 32: mod_base = OTHER; note = N1-methylpseudouracil
  modified_base 33: mod_base = OTHER; note = N1-methylpseudouracil
  modified_base 34: mod_base = OTHER; note = N1-methylpseudouracil
  modified_base 36: mod_base = OTHER; note = N1-methylpseudouracil
  modified_base 37: mod_base = OTHER; note = N1-methylpseudouracil
  modified_base 38: mod_base = OTHER; note = N1-methylpseudouracil
  modified_base 39: mod_base = OTHER; note = N1-methylpseudouracil
  modified_base 42: mod_base = OTHER; note = N1-methylpseudouracil
  modified_base 43: mod_base = OTHER; note = N1-methylpseudouracil
  modified_base 44: mod_base = OTHER; note = N1-methylpseudouracil
  modified_base 45: mod_base = OTHER; note = N1-methylpseudouracil
  modified_base 47: mod_base = OTHER; note = N1-methylpseudouracil
  modified_base 54: mod_base = OTHER; note = N1-methylpseudouracil
  modified_base 62: mod_base = OTHER; note = N1-methylpseudouracil
  modified_base 63: mod_base = OTHER; note = N1-methylpseudouracil
  modified_base 64: mod_base = OTHER; note = N1-methylpseudouracil
  modified_base 65: mod_base = OTHER; note = N1-methylpseudouracil
  modified_base 66: mod_base = OTHER; note = N1-methylpseudouracil
  modified_base 68: mod_base = OTHER; note = N1-methylpseudouracil
  modified_base 69: mod_base = OTHER; note = N1-methylpseudouracil
  modified_base 71: mod_base = OTHER; note = N1-methylpseudouracil
  modified_base 77: mod_base = OTHER; note = N1-methylpseudouracil
  modified_base 83: mod_base = OTHER; note = N1-methylpseudouracil
  modified_base 89: mod_base = OTHER; note = N1-methylpseudouracil
  modified_base 92: mod_base = OTHER; note = N1-methylpseudouracil
  modified_base 94: mod_base = OTHER; note = N1-methylpseudouracil
  modified_base 98: mod_base = OTHER; note = N1-methylpseudouracil
  modified_base 100: mod_base = OTHER; note = N1-methylpseudouracil
  modified_base 101: mod_base = OTHER; note = N1-methylpseudouracil
  modified_base 103: mod_base = OTHER; note = N1-methylpseudouracil
  modified_base 104: mod_base = OTHER; note = N1-methylpseudouracil
  modified_base 107: mod_base = OTHER; note = N1-methylpseudouracil
  modified_base 109: mod_base = OTHER; note = N1-methylpseudouracil
  modified_base 110: mod_base = OTHER; note = N1-methylpseudouracil
  modified_base 113: mod_base = OTHER; note = N1-methylpseudouracil
  modified_base 131: mod_base = OTHER; note = N1-methylpseudouracil
  modified_base 138: mod_base = OTHER; note = N1-methylpseudouracil
  modified_base 142: mod_base = OTHER; note = N1-methylpseudouracil
  modified_base 149: mod_base = OTHER; note = N1-methylpseudouracil
  modified_base 150: mod_base = OTHER; note = N1-methylpseudouracil
  modified_base 153: mod_base = OTHER; note = N1-methylpseudouracil
  modified_base 166: mod_base = OTHER; note = N1-methylpseudouracil
  modified_base 175: mod_base = OTHER; note = N1-methylpseudouracil
  modified_base 179: mod_base = OTHER; note = N1-methylpseudouracil
  modified_base 182: mod_base = OTHER; note = N1-methylpseudouracil
  modified_base 185: mod_base = OTHER; note = N1-methylpseudouracil
  modified_base 196: mod_base = OTHER; note = N1-methylpseudouracil
  modified_base 202: mod_base = OTHER; note = N1-methylpseudouracil
  modified_base 205: mod_base = OTHER; note = N1-methylpseudouracil
  modified_base 210: mod_base = OTHER; note = N1-methylpseudouracil
  modified_base 220: mod_base = OTHER; note = N1-methylpseudouracil
  modified_base 221: mod_base = OTHER; note = N1-methylpseudouracil
  modified_base 239: mod_base = OTHER; note = N1-methylpseudouracil
  modified_base 250: mod_base = OTHER; note = N1-methylpseudouracil
  modified_base 269: mod_base = OTHER; note = N1-methylpseudouracil
  modified_base 272: mod_base = OTHER; note = N1-methylpseudouracil
  modified_base 283: mod_base = OTHER; note = N1-methylpseudouracil
  modified_base 290: mod_base = OTHER; note = N1-methylpseudouracil
  modified_base 295: mod_base = OTHER; note = N1-methylpseudouracil
  modified_base 296: mod_base = OTHER; note = N1-methylpseudouracil
  modified_base 299: mod_base = OTHER; note = N1-methylpseudouracil
  modified_base 311: mod_base = OTHER; note = N1-methylpseudouracil
  modified_base 313: mod_base = OTHER; note = N1-methylpseudouracil
  modified_base 315: mod_base = OTHER; note = N1-methylpseudouracil
  modified_base 320: mod_base = OTHER; note = N1-methylpseudouracil
  modified_base 326: mod_base = OTHER; note = N1-methylpseudouracil
  modified_base 329: mod_base = OTHER; note = N1-methylpseudouracil
  modified_base 344: mod_base = OTHER; note = N1-methylpseudouracil
  modified_base 350: mod_base = OTHER; note = N1-methylpseudouracil
  modified_base 351: mod_base = OTHER; note = N1-methylpseudouracil
  modified_base 370: mod_base = OTHER; note = N1-methylpseudouracil
  modified_base 372: mod_base = OTHER; note = N1-methylpseudouracil
  modified_base 377: mod_base = OTHER; note = N1-methylpseudouracil
  modified_base 380: mod_base = OTHER; note = N1-methylpseudouracil
  modified_base 386: mod_base = OTHER; note = N1-methylpseudouracil
  modified_base 401: mod_base = OTHER; note = N1-methylpseudouracil
  modified_base 404: mod_base = OTHER; note = N1-methylpseudouracil
  modified_base 407: mod_base = OTHER; note = N1-methylpseudouracil
  modified_base 413: mod_base = OTHER; note = N1-methylpseudouracil
  modified_base 420: mod_base = OTHER; note = N1-methylpseudouracil
  modified_base 426: mod_base = OTHER; note = N1-methylpseudouracil
  modified_base 437: mod_base = OTHER; note = N1-methylpseudouracil
  modified_base 443: mod_base = OTHER; note = N1-methylpseudouracil
  modified_base 449: mod_base = OTHER; note = N1-methylpseudouracil
  modified_base 466: mod_base = OTHER; note = N1-methylpseudouracil
  modified_base 471: mod_base = OTHER; note = N1-methylpseudouracil
  modified_base 473: mod_base = OTHER; note = N1-methylpseudouracil
  modified_base 479: mod_base = OTHER; note = N1-methylpseudouracil
  modified_base 481: mod_base = OTHER; note = N1-methylpseudouracil
  modified_base 484: mod_base = OTHER; note = N1-methylpseudouracil
  modified_base 488: mod_base = OTHER; note = N1-methylpseudouracil
  modified_base 491: mod_base = OTHER; note = N1-methylpseudouracil
  modified_base 497: mod_base = OTHER; note = N1-methylpseudouracil
  modified_base 499: mod_base = OTHER; note = N1-methylpseudouracil
  modified_base 509: mod_base = OTHER; note = N1-methylpseudouracil
  modified_base 519: mod_base = OTHER; note = N1-methylpseudouracil
  modified_base 521: mod_base = OTHER; note = N1-methylpseudouracil
  modified_base 530: mod_base = OTHER; note = N1-methylpseudouracil
  modified_base 539: mod_base = OTHER; note = N1-methylpseudouracil
  modified_base 551: mod_base = OTHER; note = N1-methylpseudouracil
  modified_base 563: mod_base = OTHER; note = N1-methylpseudouracil
  modified_base 565: mod_base = OTHER; note = N1-methylpseudouracil
  modified_base 572: mod_base = OTHER; note = N1-methylpseudouracil
  modified_base 577: mod_base = OTHER; note = N1-methylpseudouracil
  modified_base 583: mod_base = OTHER; note = N1-methylpseudouracil
  modified_base 584: mod_base = OTHER; note = N1-methylpseudouracil
  modified_base 590: mod_base = OTHER; note = N1-methylpseudouracil
  modified_base 595: mod_base = OTHER; note = N1-methylpseudouracil
  modified_base 596: mod_base = OTHER; note = N1-methylpseudouracil
  modified_base 601: mod_base = OTHER; note = N1-methylpseudouracil
  modified_base 604: mod_base = OTHER; note = N1-methylpseudouracil
  modified_base 605: mod_base = OTHER; note = N1-methylpseudouracil
  modified_base 608: mod_base = OTHER; note = N1-methylpseudouracil
  modified_base 620: mod_base = OTHER; note = N1-methylpseudouracil
  modified_base 628: mod_base = OTHER; note = N1-methylpseudouracil
  modified_base 629: mod_base = OTHER; note = N1-methylpseudouracil
  modified_base 632: mod_base = OTHER; note = N1-methylpseudouracil
  modified_base 645: mod_base = OTHER; note = N1-methylpseudouracil
  modified_base 653: mod_base = OTHER; note = N1-methylpseudouracil
  modified_base 664: mod_base = OTHER; note = N1-methylpseudouracil
  modified_base 674: mod_base = OTHER; note = N1-methylpseudouracil
  modified_base 678: mod_base = OTHER; note = N1-methylpseudouracil
  modified_base 679: mod_base = OTHER; note = N1-methylpseudouracil
  modified_base 682: mod_base = OTHER; note = N1-methylpseudouracil
  modified_base 683: mod_base = OTHER; note = N1-methylpseudouracil
  modified_base 685: mod_base = OTHER; note = N1-methylpseudouracil
  modified_base 689: mod_base = OTHER; note = N1-methylpseudouracil
  modified_base 697: mod_base = OTHER; note = N1-methylpseudouracil
  modified_base 698: mod_base = OTHER; note = N1-methylpseudouracil
  modified_base 703: mod_base = OTHER; note = N1-methylpseudouracil
  modified_base 704: mod_base = OTHER; note = N1-methylpseudouracil
  modified_base 713: mod_base = OTHER; note = N1-methylpseudouracil
  modified_base 716: mod_base = OTHER; note = N1-methylpseudouracil
  modified_base 722: mod_base = OTHER; note = N1-methylpseudouracil
  modified_base 742: mod_base = OTHER; note = N1-methylpseudouracil
  modified_base 743: mod_base = OTHER; note = N1-methylpseudouracil
  modified_base 752: mod_base = OTHER; note = N1-methylpseudouracil
  modified_base 755: mod_base = OTHER; note = N1-methylpseudouracil
  modified_base 770: mod_base = OTHER; note = N1-methylpseudouracil
  modified_base 782: mod_base = OTHER; note = N1-methylpseudouracil
  modified_base 798: mod_base = OTHER; note = N1-methylpseudouracil
  modified_base 802: mod_base = OTHER; note = N1-methylpseudouracil
  modified_base 803: mod_base = OTHER; note = N1-methylpseudouracil
  modified_base 810: mod_base = OTHER; note = N1-methylpseudouracil
  modified_base 812: mod_base = OTHER; note = N1-methylpseudouracil
  modified_base 815: mod_base = OTHER; note = N1-methylpseudouracil
  modified_base 827: mod_base = OTHER; note = N1-methylpseudouracil
  modified_base 829: mod_base = OTHER; note = N1-methylpseudouracil
  modified_base 842: mod_base = OTHER; note = N1-methylpseudouracil
  modified_base 847: mod_base = OTHER; note = N1-methylpseudouracil
  modified_base 863: mod_base = OTHER; note = N1-methylpseudouracil
  modified_base 869: mod_base = OTHER; note = N1-methylpseudouracil
  modified_base 872: mod_base = OTHER; note = N1-methylpseudouracil
  modified_base 875: mod_base = OTHER; note = N1-methylpseudouracil
  modified_base 877: mod_base = OTHER; note = N1-methylpseudouracil
  modified_base 878: mod_base = OTHER; note = N1-methylpseudouracil
  modified_base 881: mod_base = OTHER; note = N1-methylpseudouracil
  modified_base 883: mod_base = OTHER; note = N1-methylpseudouracil
  modified_base 895: mod_base = OTHER; note = N1-methylpseudouracil
  modified_base 901: mod_base = OTHER; note = N1-methylpseudouracil
  modified_base 902: mod_base = OTHER; note = N1-methylpseudouracil
  modified_base 908: mod_base = OTHER; note = N1-methylpseudouracil
  modified_base 920: mod_base = OTHER; note = N1-methylpseudouracil
  modified_base 927: mod_base = OTHER; note = N1-methylpseudouracil
  modified_base 929: mod_base = OTHER; note = N1-methylpseudouracil
  modified_base 932: mod_base = OTHER; note = N1-methylpseudouracil
  modified_base 935: mod_base = OTHER; note = N1-methylpseudouracil
  modified_base 939: mod_base = OTHER; note = N1-methylpseudouracil
  modified_base 950: mod_base = OTHER; note = N1-methylpseudouracil
  modified_base 952: mod_base = OTHER; note = N1-methylpseudouracil
  modified_base 959: mod_base = OTHER; note = N1-methylpseudouracil
  modified_base 976: mod_base = OTHER; note = N1-methylpseudouracil
  modified_base 983: mod_base = OTHER; note = N1-methylpseudouracil
  modified_base 992: mod_base = OTHER; note = N1-methylpseudouracil
  modified_base 995: mod_base = OTHER; note = N1-methylpseudouracil
  modified_base 1000: mod_base = OTHER; note = N1-methylpseudouracil
  modified_base 1010: mod_base = OTHER; note = N1-methylpseudouracil
  modified_base 1019: mod_base = OTHER; note = N1-methylpseudouracil
  modified_base 1022: mod_base = OTHER; note = N1-methylpseudouracil
  modified_base 1031: mod_base = OTHER; note = N1-methylpseudouracil
  modified_base 1034: mod_base = OTHER; note = N1-methylpseudouracil
  modified_base 1046: mod_base = OTHER; note = N1-methylpseudouracil
  modified_base 1049: mod_base = OTHER; note = N1-methylpseudouracil
  modified_base 1052: mod_base = OTHER; note = N1-methylpseudouracil
  modified_base 1055: mod_base = OTHER; note = N1-methylpseudouracil
  modified_base 1057: mod_base = OTHER; note = N1-methylpseudouracil
  modified_base 1058: mod_base = OTHER; note = N1-methylpseudouracil
  modified_base 1064: mod_base = OTHER; note = N1-methylpseudouracil
  modified_base 1079: mod_base = OTHER; note = N1-methylpseudouracil
  modified_base 1085: mod_base = OTHER; note = N1-methylpseudouracil
  modified_base 1087: mod_base = OTHER; note = N1-methylpseudouracil
  modified_base 1096: mod_base = OTHER; note = N1-methylpseudouracil
  modified_base 1106: mod_base = OTHER; note = N1-methylpseudouracil
  modified_base 1109: mod_base = OTHER; note = N1-methylpseudouracil
  modified_base 1110: mod_base = OTHER; note = N1-methylpseudouracil
  modified_base 1124: mod_base = OTHER; note = N1-methylpseudouracil
  modified_base 1128: mod_base = OTHER; note = N1-methylpseudouracil
  modified_base 1130: mod_base = OTHER; note = N1-methylpseudouracil
  modified_base 1133: mod_base = OTHER; note = N1-methylpseudouracil
  modified_base 1154: mod_base = OTHER; note = N1-methylpseudouracil
  modified_base 1157: mod_base = OTHER; note = N1-methylpseudouracil
  modified_base 1163: mod_base = OTHER; note = N1-methylpseudouracil
  modified_base 1166: mod_base = OTHER; note = N1-methylpseudouracil
  modified_base 1169: mod_base = OTHER; note = N1-methylpseudouracil
  modified_base 1171: mod_base = OTHER; note = N1-methylpseudouracil
  modified_base 1177: mod_base = OTHER; note = N1-methylpseudouracil
  modified_base 1187: mod_base = OTHER; note = N1-methylpseudouracil
  modified_base 1199: mod_base = OTHER; note = N1-methylpseudouracil
  modified_base 1205: mod_base = OTHER; note = N1-methylpseudouracil
  modified_base 1211: mod_base = OTHER; note = N1-methylpseudouracil
  modified_base 1214: mod_base = OTHER; note = N1-methylpseudouracil
  modified_base 1232: mod_base = OTHER; note = N1-methylpseudouracil
  modified_base 1238: mod_base = OTHER; note = N1-methylpseudouracil
  modified_base 1240: mod_base = OTHER; note = N1-methylpseudouracil
  modified_base 1243: mod_base = OTHER; note = N1-methylpseudouracil
  modified_base 1244: mod_base = OTHER; note = N1-methylpseudouracil
  modified_base 1253: mod_base = OTHER; note = N1-methylpseudouracil
  modified_base 1255: mod_base = OTHER; note = N1-methylpseudouracil
  modified_base 1271: mod_base = OTHER; note = N1-methylpseudouracil
  modified_base 1273: mod_base = OTHER; note = N1-methylpseudouracil
  modified_base 1274: mod_base = OTHER; note = N1-methylpseudouracil
  modified_base 1291: mod_base = OTHER; note = N1-methylpseudouracil
  modified_base 1301: mod_base = OTHER; note = N1-methylpseudouracil
  modified_base 1307: mod_base = OTHER; note = N1-methylpseudouracil
  modified_base 1324: mod_base = OTHER; note = N1-methylpseudouracil
  modified_base 1325: mod_base = OTHER; note = N1-methylpseudouracil
  modified_base 1331: mod_base = OTHER; note = N1-methylpseudouracil
  modified_base 1337: mod_base = OTHER; note = N1-methylpseudouracil
  modified_base 1343: mod_base = OTHER; note = N1-methylpseudouracil
  modified_base 1347: mod_base = OTHER; note = N1-methylpseudouracil
  modified_base 1351: mod_base = OTHER; note = N1-methylpseudouracil
  modified_base 1353: mod_base = OTHER; note = N1-methylpseudouracil
  modified_base 1373: mod_base = OTHER; note = N1-methylpseudouracil
  modified_base 1376: mod_base = OTHER; note = N1-methylpseudouracil
  modified_base 1379: mod_base = OTHER; note = N1-methylpseudouracil
  modified_base 1388: mod_base = OTHER; note = N1-methylpseudouracil
  modified_base 1394: mod_base = OTHER; note = N1-methylpseudouracil
  modified_base 1406: mod_base = OTHER; note = N1-methylpseudouracil
  modified_base 1412: mod_base = OTHER; note = N1-methylpseudouracil
  modified_base 1415: mod_base = OTHER; note = N1-methylpseudouracil
  modified_base 1418: mod_base = OTHER; note = N1-methylpseudouracil
  modified_base 1420: mod_base = OTHER; note = N1-methylpseudouracil
  modified_base 1422: mod_base = OTHER; note = N1-methylpseudouracil
  modified_base 1429: mod_base = OTHER; note = N1-methylpseudouracil
  modified_base 1435: mod_base = OTHER; note = N1-methylpseudouracil
  modified_base 1441: mod_base = OTHER; note = N1-methylpseudouracil
  modified_base 1454: mod_base = OTHER; note = N1-methylpseudouracil
  modified_base 1460: mod_base = OTHER; note = N1-methylpseudouracil
  modified_base 1465: mod_base = OTHER; note = N1-methylpseudouracil
  modified_base 1467: mod_base = OTHER; note = N1-methylpseudouracil
  modified_base 1474: mod_base = OTHER; note = N1-methylpseudouracil
  modified_base 1494: mod_base = OTHER; note = N1-methylpseudouracil
  modified_base 1495: mod_base = OTHER; note = N1-methylpseudouracil
  modified_base 1496: mod_base = OTHER; note = N1-methylpseudouracil
  modified_base 1501: mod_base = OTHER; note = N1-methylpseudouracil
  modified_base 1503: mod_base = OTHER; note = N1-methylpseudouracil
  modified_base 1508: mod_base = OTHER; note = N1-methylpseudouracil
  modified_base 1510: mod_base = OTHER; note = N1-methylpseudouracil
  modified_base 1512: mod_base = OTHER; note = N1-methylpseudouracil
  modified_base 1516: mod_base = OTHER; note = N1-methylpseudouracil
  modified_base 1527: mod_base = OTHER; note = N1-methylpseudouracil
  modified_base 1532: mod_base = OTHER; note = N1-methylpseudouracil
  modified_base 1543: mod_base = OTHER; note = N1-methylpseudouracil
  modified_base 1545: mod_base = OTHER; note = N1-methylpseudouracil
  modified_base 1549: mod_base = OTHER; note = N1-methylpseudouracil
  modified_base 1562: mod_base = OTHER; note = N1-methylpseudouracil
  modified_base 1565: mod_base = OTHER; note = N1-methylpseudouracil
  modified_base 1579: mod_base = OTHER; note = N1-methylpseudouracil
  modified_base 1606: mod_base = OTHER; note = N1-methylpseudouracil
  modified_base 1608: mod_base = OTHER; note = N1-methylpseudouracil
  modified_base 1609: mod_base = OTHER; note = N1-methylpseudouracil
  modified_base 1614: mod_base = OTHER; note = N1-methylpseudouracil
  modified_base 1624: mod_base = OTHER; note = N1-methylpseudouracil
  modified_base 1627: mod_base = OTHER; note = N1-methylpseudouracil
  modified_base 1630: mod_base = OTHER; note = N1-methylpseudouracil
  modified_base 1639: mod_base = OTHER; note = N1-methylpseudouracil
  modified_base 1643: mod_base = OTHER; note = N1-methylpseudouracil
  modified_base 1645: mod_base = OTHER; note = N1-methylpseudouracil
  modified_base 1647: mod_base = OTHER; note = N1-methylpseudouracil
  modified_base 1652: mod_base = OTHER; note = N1-methylpseudouracil
  modified_base 1660: mod_base = OTHER; note = N1-methylpseudouracil
  modified_base 1670: mod_base = OTHER; note = N1-methylpseudouracil
  modified_base 1672: mod_base = OTHER; note = N1-methylpseudouracil
  modified_base 1681: mod_base = OTHER; note = N1-methylpseudouracil
  modified_base 1684: mod_base = OTHER; note = N1-methylpseudouracil
  modified_base 1690: mod_base = OTHER; note = N1-methylpseudouracil
  modified_base 1699: mod_base = OTHER; note = N1-methylpseudouracil
  modified_base 1700: mod_base = OTHER; note = N1-methylpseudouracil
  modified_base 1702: mod_base = OTHER; note = N1-methylpseudouracil
  modified_base 1705: mod_base = OTHER; note = N1-methylpseudouracil
  modified_base 1709: mod_base = OTHER; note = N1-methylpseudouracil
  modified_base 1724: mod_base = OTHER; note = N1-methylpseudouracil
  modified_base 1727: mod_base = OTHER; note = N1-methylpseudouracil
  modified_base 1729: mod_base = OTHER; note = N1-methylpseudouracil
  modified_base 1731: mod_base = OTHER; note = N1-methylpseudouracil
  modified_base 1747: mod_base = OTHER; note = N1-methylpseudouracil
  modified_base 1753: mod_base = OTHER; note = N1-methylpseudouracil
  modified_base 1762: mod_base = OTHER; note = N1-methylpseudouracil
  modified_base 1766: mod_base = OTHER; note = N1-methylpseudouracil
  modified_base 1768: mod_base = OTHER; note = N1-methylpseudouracil
  modified_base 1776: mod_base = OTHER; note = N1-methylpseudouracil
  modified_base 1780: mod_base = OTHER; note = N1-methylpseudouracil
  modified_base 1792: mod_base = OTHER; note = N1-methylpseudouracil
  modified_base 1795: mod_base = OTHER; note = N1-methylpseudouracil
  modified_base 1801: mod_base = OTHER; note = N1-methylpseudouracil
  modified_base 1810: mod_base = OTHER; note = N1-methylpseudouracil
  modified_base 1819: mod_base = OTHER; note = N1-methylpseudouracil
  modified_base 1821: mod_base = OTHER; note = N1-methylpseudouracil
  modified_base 1822: mod_base = OTHER; note = N1-methylpseudouracil
  modified_base 1826: mod_base = OTHER; note = N1-methylpseudouracil
  modified_base 1828: mod_base = OTHER; note = N1-methylpseudouracil
  modified_base 1841: mod_base = OTHER; note = N1-methylpseudouracil
  modified_base 1844: mod_base = OTHER; note = N1-methylpseudouracil
  modified_base 1846: mod_base = OTHER; note = N1-methylpseudouracil
  modified_base 1848: mod_base = OTHER; note = N1-methylpseudouracil
  modified_base 1849: mod_base = OTHER; note = N1-methylpseudouracil
  modified_base 1863: mod_base = OTHER; note = N1-methylpseudouracil
  modified_base 1864: mod_base = OTHER; note = N1-methylpseudouracil
  modified_base 1868: mod_base = OTHER; note = N1-methylpseudouracil
  modified_base 1870: mod_base = OTHER; note = N1-methylpseudouracil
  modified_base 1879: mod_base = OTHER; note = N1-methylpseudouracil
  modified_base 1883: mod_base = OTHER; note = N1-methylpseudouracil
  modified_base 1885: mod_base = OTHER; note = N1-methylpseudouracil
  modified_base 1896: mod_base = OTHER; note = N1-methylpseudouracil
  modified_base 1903: mod_base = OTHER; note = N1-methylpseudouracil
  modified_base 1908: mod_base = OTHER; note = N1-methylpseudouracil
  modified_base 1911: mod_base = OTHER; note = N1-methylpseudouracil
  modified_base 1915: mod_base = OTHER; note = N1-methylpseudouracil
  modified_base 1924: mod_base = OTHER; note = N1-methylpseudouracil
  modified_base 1933: mod_base = OTHER; note = N1-methylpseudouracil
  modified_base 1935: mod_base = OTHER; note = N1-methylpseudouracil
  modified_base 1945: mod_base = OTHER; note = N1-methylpseudouracil
  modified_base 1960: mod_base = OTHER; note = N1-methylpseudouracil
  modified_base 1962: mod_base = OTHER; note = N1-methylpseudouracil
  modified_base 1963: mod_base = OTHER; note = N1-methylpseudouracil
  modified_base 1967: mod_base = OTHER; note = N1-methylpseudouracil
  modified_base 1972: mod_base = OTHER; note = N1-methylpseudouracil
  modified_base 1979: mod_base = OTHER; note = N1-methylpseudouracil
  modified_base 1981: mod_base = OTHER; note = N1-methylpseudouracil
  modified_base 1998: mod_base = OTHER; note = N1-methylpseudouracil
  modified_base 2008: mod_base = OTHER; note = N1-methylpseudouracil
  modified_base 2012: mod_base = OTHER; note = N1-methylpseudouracil
  modified_base 2020: mod_base = OTHER; note = N1-methylpseudouracil
  modified_base 2027: mod_base = OTHER; note = N1-methylpseudouracil
  modified_base 2042: mod_base = OTHER; note = N1-methylpseudouracil
  modified_base 2046: mod_base = OTHER; note = N1-methylpseudouracil
  modified_base 2059: mod_base = OTHER; note = N1-methylpseudouracil
  modified_base 2060: mod_base = OTHER; note = N1-methylpseudouracil
  modified_base 2062: mod_base = OTHER; note = N1-methylpseudouracil
  modified_base 2078: mod_base = OTHER; note = N1-methylpseudouracil
  modified_base 2080: mod_base = OTHER; note = N1-methylpseudouracil
  modified_base 2083: mod_base = OTHER; note = N1-methylpseudouracil
  modified_base 2086: mod_base = OTHER; note = N1-methylpseudouracil
  modified_base 2090: mod_base = OTHER; note = N1-methylpseudouracil
  modified_base 2107: mod_base = OTHER; note = N1-methylpseudouracil
  modified_base 2111: mod_base = OTHER; note = N1-methylpseudouracil
  modified_base 2114: mod_base = OTHER; note = N1-methylpseudouracil
  modified_base 2119: mod_base = OTHER; note = N1-methylpseudouracil
  modified_base 2120: mod_base = OTHER; note = N1-methylpseudouracil
  modified_base 2123: mod_base = OTHER; note = N1-methylpseudouracil
  modified_base 2126: mod_base = OTHER; note = N1-methylpseudouracil
  modified_base 2153: mod_base = OTHER; note = N1-methylpseudouracil
  modified_base 2156: mod_base = OTHER; note = N1-methylpseudouracil
  modified_base 2161: mod_base = OTHER; note = N1-methylpseudouracil
  modified_base 2165: mod_base = OTHER; note = N1-methylpseudouracil
  modified_base 2179: mod_base = OTHER; note = N1-methylpseudouracil
  modified_base 2193: mod_base = OTHER; note = N1-methylpseudouracil
  modified_base 2198: mod_base = OTHER; note = N1-methylpseudouracil
  modified_base 2204: mod_base = OTHER; note = N1-methylpseudouracil
  modified_base 2207: mod_base = OTHER; note = N1-methylpseudouracil
  modified_base 2210: mod_base = OTHER; note = N1-methylpseudouracil
  modified_base 2213: mod_base = OTHER; note = N1-methylpseudouracil
  modified_base 2219: mod_base = OTHER; note = N1-methylpseudouracil
  modified_base 2225: mod_base = OTHER; note = N1-methylpseudouracil
  modified_base 2231: mod_base = OTHER; note = N1-methylpseudouracil
  modified_base 2234: mod_base = OTHER; note = N1-methylpseudouracil
  modified_base 2237: mod_base = OTHER; note = N1-methylpseudouracil
  modified_base 2240: mod_base = OTHER; note = N1-methylpseudouracil
  modified_base 2246: mod_base = OTHER; note = N1-methylpseudouracil
  modified_base 2249: mod_base = OTHER; note = N1-methylpseudouracil
  modified_base 2252: mod_base = OTHER; note = N1-methylpseudouracil
  modified_base 2255: mod_base = OTHER; note = N1-methylpseudouracil
  modified_base 2257: mod_base = OTHER; note = N1-methylpseudouracil
  modified_base 2261: mod_base = OTHER; note = N1-methylpseudouracil
  modified_base 2263: mod_base = OTHER; note = N1-methylpseudouracil
  modified_base 2270: mod_base = OTHER; note = N1-methylpseudouracil
  modified_base 2273: mod_base = OTHER; note = N1-methylpseudouracil
  modified_base 2276: mod_base = OTHER; note = N1-methylpseudouracil
  modified_base 2278: mod_base = OTHER; note = N1-methylpseudouracil
  modified_base 2281: mod_base = OTHER; note = N1-methylpseudouracil
  modified_base 2282: mod_base = OTHER; note = N1-methylpseudouracil
  modified_base 2300: mod_base = OTHER; note = N1-methylpseudouracil
  modified_base 2308: mod_base = OTHER; note = N1-methylpseudouracil
  modified_base 2309: mod_base = OTHER; note = N1-methylpseudouracil
  modified_base 2323: mod_base = OTHER; note = N1-methylpseudouracil
  modified_base 2325: mod_base = OTHER; note = N1-methylpseudouracil
  modified_base 2335: mod_base = OTHER; note = N1-methylpseudouracil
  modified_base 2355: mod_base = OTHER; note = N1-methylpseudouracil
  modified_base 2357: mod_base = OTHER; note = N1-methylpseudouracil
  modified_base 2359: mod_base = OTHER; note = N1-methylpseudouracil
  modified_base 2368: mod_base = OTHER; note = N1-methylpseudouracil
  modified_base 2380: mod_base = OTHER; note = N1-methylpseudouracil
  modified_base 2381: mod_base = OTHER; note = N1-methylpseudouracil
  modified_base 2390: mod_base = OTHER; note = N1-methylpseudouracil
  modified_base 2395: mod_base = OTHER; note = N1-methylpseudouracil
  modified_base 2420: mod_base = OTHER; note = N1-methylpseudouracil
  modified_base 2426: mod_base = OTHER; note = N1-methylpseudouracil
  modified_base 2428: mod_base = OTHER; note = N1-methylpseudouracil
  modified_base 2437: mod_base = OTHER; note = N1-methylpseudouracil
  modified_base 2439: mod_base = OTHER; note = N1-methylpseudouracil
  modified_base 2450: mod_base = OTHER; note = N1-methylpseudouracil
  modified_base 2457: mod_base = OTHER; note = N1-methylpseudouracil
  modified_base 2462: mod_base = OTHER; note = N1-methylpseudouracil
  modified_base 2465: mod_base = OTHER; note = N1-methylpseudouracil
  modified_base 2471: mod_base = OTHER; note = N1-methylpseudouracil
  modified_base 2476: mod_base = OTHER; note = N1-methylpseudouracil
  modified_base 2482: mod_base = OTHER; note = N1-methylpseudouracil
  modified_base 2485: mod_base = OTHER; note = N1-methylpseudouracil
  modified_base 2488: mod_base = OTHER; note = N1-methylpseudouracil
  modified_base 2493: mod_base = OTHER; note = N1-methylpseudouracil
  modified_base 2500: mod_base = OTHER; note = N1-methylpseudouracil
  modified_base 2504: mod_base = OTHER; note = N1-methylpseudouracil
  modified_base 2509: mod_base = OTHER; note = N1-methylpseudouracil
  modified_base 2513: mod_base = OTHER; note = N1-methylpseudouracil
  modified_base 2514: mod_base = OTHER; note = N1-methylpseudouracil
  modified_base 2516: mod_base = OTHER; note = N1-methylpseudouracil
  modified_base 2517: mod_base = OTHER; note = N1-methylpseudouracil
  modified_base 2523: mod_base = OTHER; note = N1-methylpseudouracil
  modified_base 2524: mod_base = OTHER; note = N1-methylpseudouracil
  modified_base 2530: mod_base = OTHER; note = N1-methylpseudouracil
  modified_base 2543: mod_base = OTHER; note = N1-methylpseudouracil
  modified_base 2546: mod_base = OTHER; note = N1-methylpseudouracil
  modified_base 2551: mod_base = OTHER; note = N1-methylpseudouracil
  modified_base 2552: mod_base = OTHER; note = N1-methylpseudouracil
  modified_base 2555: mod_base = OTHER; note = N1-methylpseudouracil
  modified_base 2563: mod_base = OTHER; note = N1-methylpseudouracil
  modified_base 2579: mod_base = OTHER; note = N1-methylpseudouracil
  modified_base 2580: mod_base = OTHER; note = N1-methylpseudouracil
  modified_base 2582: mod_base = OTHER; note = N1-methylpseudouracil
  modified_base 2588: mod_base = OTHER; note = N1-methylpseudouracil
  modified_base 2593: mod_base = OTHER; note = N1-methylpseudouracil
  modified_base 2596: mod_base = OTHER; note = N1-methylpseudouracil
  modified_base 2598: mod_base = OTHER; note = N1-methylpseudouracil
  modified_base 2599: mod_base = OTHER; note = N1-methylpseudouracil
  modified_base 2600: mod_base = OTHER; note = N1-methylpseudouracil
  modified_base 2604: mod_base = OTHER; note = N1-methylpseudouracil
  modified_base 2609: mod_base = OTHER; note = N1-methylpseudouracil
  modified_base 2611: mod_base = OTHER; note = N1-methylpseudouracil
  modified_base 2615: mod_base = OTHER; note = N1-methylpseudouracil
ggaaatcgcaaaatttgctcttcgcgttagatttcttttagttttctcgcaactagcaagctttttgttctcgccatggggatcgagctgctgtgcctgttcttcctgttcctgggacggaacgaccacgtgcagggtggctgcgcccttggtggggcagagacctgcgaggactgcctgctcatcggcccacagtgcgcctggtgcgctcaggagaacttcacccaccccagcggagtgggcgagaggtgcgacaccccggccaacctgctggccaaggggtgccagctgaacttcatcgagaaccccgtctctcaggtggagatcctgaagaacaagcccctcagcgttgggcggcagaagaacagctctgacatcgtgcagatcgcgccccagagcctgatcctgaaactacggcctggcggtgcgcaaaccctgcaggtccacgtgcggcagaccgaggactaccctgtggacctgtactacctgatggacctctccgccagcatggacgacgatctgaacaccatcaaggagctgggcagccgcctgagcaaggagatgtccaagctgacctccaacttccgcctggggttcggatccttcgtggagaagcccgtgagccccttcgtgaagaccacccctgaggagatcgccaacccctgcagcagcatcccttacttctgcctgcccaccttcggcttcaagcacatcctgccactgaccaacgacgccgagcggttcaacgagatcgtgaagaaccagaagatcagcgccaacatcgacaccccggagggtgggttcgacgctatcatgcaggccgccgtgtgcaaggagaagatcggctggcgcaacgacagcctgcacctgctggtgttcgtgtccgacgccgactcccacttcggcatggacagcaagctggccggtatcgtgatccctaacgacggcctgtgccacctggacagcaagaacgagtacagcatgagcaccgtgctggagtaccccaccatcggccagctgatcgacaagctggtgcagaacaacgtgctgctgatcttcgccgtgacccaggagcaggtgcacctctacgagaactacgccaagctgattccaggcgccaccgtcggtctgctgcagaaggacagcggcaacatcctgcagctgatcatctccgcctacgaggagctgaggagcgaggtggagctggaggtgctcggggacaccgagggcctgaacctgtccttcaccgccatctgcaacaacgggaccctcttccagcaccagaagaagtgcagccacatgaaggtgggcgacaccgccagcttcagcgtcaccgtgaacatacctcactgtgagcggcggagcaggcacatcatcatcaagcccgtgggcctgggagacgccctggagctgctggtgtctcccgagtgcaactgcgactgccagaaggaggtggaggtgaactctagcaagtgccaccacggcaacgggagtttccagtgtggcgtgtgtgcctgccaccccggtcacatgggaccccggtgtgagtgcggggaggacatgctgagcaccgacagctgcaaggaggccccagaccacccgagctgttccggtcggggcgactgctactgcggccagtgcatctgtcacctgagcccctacggcaacatctacgggccctactgccagtgcgacaacttctcctgcgtgcgccacaaaggcctgctgtgtggcggcaacggcgactgcgactgcggggagtgcgtgtgccgcagtgggtggaccggcgagtactgcaactgcaccacctccaccgactcttgcgtgtccgaggacggggtgctgtgttccgggcgcggagattgcgtgtgcgggaagtgcgtgtgcaccaaccctggcgcatcgggtcctacctgcgagaggtgccccacctgtggcgacccctgcaacagcaagcgctcttgcatcgagtgccacctctcagcagcagggcaggctcgggaggagtgcgtggacaagtgcaagctcgccggcgccaccatcagtgaggaggaggacttctccaaggacggcagcgtgtcctgctccctccagggcgagaacgagtgcctcatcaccttcctgatcaccaccgacaacgagggcaagaccatcatccactccatcaacgagaaggactgccccaagccgcctaacatccccatgatcatgctgggcgtgagcctggccatcctgctgatcggcgtggtgctgctgtgcatctggaagctgctggtctccttccacgaccgcaaggaggtggccaagttcgaggccgagcgctctaaggccaagtggcagaccggcaccaaccctctgtaccggggctccaccagcaccttcaagaacgtgacctacaagcaccgcgagaagcagaaggtggacctgtccaccgactgtggcaagcccatccccaatcccctgctggggctggactccacctgataataggctggagcctcggtggcctagcttcttgccccttgggcctccccccagcccctcctccccttcctgcacccgtaccccccaaacaccattgtcacactccagtggtctttgaataaagtctgagtgggcggc

SEQ ID NO: 164 - RNA, 2622 nt, unidentified
  source 1..2622: mol_type = unassigned RNA
  modified_base 6: mod_base = OTHER; note = N1-methylpseudouracil
  modified_base 14: mod_base = OTHER; note = N1-methylpseudouracil
  modified_base 15: mod_base = OTHER; note = N1-methylpseudouracil
  modified_base 16: mod_base = OTHER; note = N1-methylpseudouracil
  modified_base 19: mod_base = OTHER; note = N1-methylpseudouracil
  modified_base 21: mod_base = OTHER; note = N1-methylpseudouracil
  modified_base 22: mod_base = OTHER; note = N1-methylpseudouracil
  modified_base 27: mod_base = OTHER; note = N1-methylpseudouracil
  modified_base 28: mod_base = OTHER; note = N1-methylpseudouracil
  modified_base 32: mod_base = OTHER; note = N1-methylpseudouracil
  modified_base 33: mod_base = OTHER; note = N1-methylpseudouracil
  modified_base 34: mod_base = OTHER; note = N1-methylpseudouracil
  modified_base 36: mod_base = OTHER; note = N1-methylpseudouracil
  modified_base 37: mod_base = OTHER; note = N1-methylpseudouracil
  modified_base 38: mod_base = OTHER; note = N1-methylpseudouracil
  modified_base 39: mod_base = OTHER; note = N1-methylpseudouracil
  modified_base 42: mod_base = OTHER; note = N1-methylpseudouracil
  modified_base 43: mod_base = OTHER; note = N1-methylpseudouracil
  modified_base 44: mod_base = OTHER; note = N1-methylpseudouracil
  modified_base 45: mod_base = OTHER; note = N1-methylpseudouracil
  modified_base 47: mod_base = OTHER; note = N1-methylpseudouracil
  modified_base 54: mod_base = OTHER; note = N1-methylpseudouracil
  modified_base 62: mod_base = OTHER; note = N1-methylpseudouracil
  modified_base 63: mod_base = OTHER; note = N1-methylpseudouracil
  modified_base 64: mod_base = OTHER; note = N1-methylpseudouracil
  modified_base 65: mod_base = OTHER; note = N1-methylpseudouracil
  modified_base 66: mod_base = OTHER; note = N1-methylpseudouracil
  modified_base 68: mod_base = OTHER; note = N1-methylpseudouracil
  modified_base 69: mod_base = OTHER; note = N1-methylpseudouracil
  modified_base 71: mod_base = OTHER; note = N1-methylpseudouracil
  modified_base 77: mod_base = OTHER; note = N1-methylpseudouracil
  modified_base 83: mod_base = OTHER; note = N1-methylpseudouracil
  modified_base 89: mod_base = OTHER; note = N1-methylpseudouracil
  modified_base 92: mod_base = OTHER; note = N1-methylpseudouracil
  modified_base 94: mod_base = OTHER; note = N1-methylpseudouracil
  modified_base 98: mod_base = OTHER; note = N1-methylpseudouracil
  modified_base 100: mod_base = OTHER; note = N1-methylpseudouracil
  modified_base 101: mod_base = OTHER; note = N1-methylpseudouracil
  modified_base 103: mod_base = OTHER; note = N1-methylpseudouracil
  modified_base 104: mod_base = OTHER; note = N1-methylpseudouracil
  modified_base 107: mod_base = OTHER; note = N1-methylpseudouracil
  modified_base 109: mod_base = OTHER; note = N1-methylpseudouracil
  modified_base 110: mod_base = OTHER; note = N1-methylpseudouracil
  modified_base 113: mod_base = OTHER; note = N1-methylpseudouracil
  modified_base 131: mod_base = OTHER; note = N1-methylpseudouracil
  modified_base 138: mod_base = OTHER; note = N1-methylpseudouracil
  modified_base 142: mod_base = OTHER; note = N1-methylpseudouracil
  modified_base 149: mod_base = OTHER; note = N1-methylpseudouracil
  modified_base 150: mod_base = OTHER; note = N1-methylpseudouracil
  modified_base 153: mod_base = OTHER; note = N1-methylpseudouracil
  modified_base 166: mod_base = OTHER; note = N1-methylpseudouracil
  modified_base 175: mod_base = OTHER; note = N1-methylpseudouracil
  modified_base 179: mod_base = OTHER; note = N1-methylpseudouracil
  modified_base 182: mod_base = OTHER; note = N1-methylpseudouracil
  modified_base 185: mod_base = OTHER; note = N1-methylpseudouracil
  modified_base 196: mod_base = OTHER; note = N1-methylpseudouracil
  modified_base 202: mod_base = OTHER; note = N1-methylpseudouracil
  modified_base 205: mod_base = OTHER; note = N1-methylpseudouracil
  modified_base 210: mod_base = OTHER; note = N1-methylpseudouracil
  modified_base 220: mod_base = OTHER; note = N1-methylpseudouracil
  modified_base 221: mod_base = OTHER; note = N1-methylpseudouracil
  modified_base 239: mod_base = OTHER; note = N1-methylpseudouracil
  modified_base 250: mod_base = OTHER; note = N1-methylpseudouracil
  modified_base 269: mod_base = OTHER; note = N1-methylpseudouracil
  modified_base 272: mod_base = OTHER; note = N1-methylpseudouracil
  modified_base 283: mod_base = OTHER; note = N1-methylpseudouracil
  modified_base 290: mod_base = OTHER; note = N1-methylpseudouracil
  modified_base 295: mod_base = OTHER; note = N1-methylpseudouracil
  modified_base 296: mod_base = OTHER; note = N1-methylpseudouracil
  modified_base 299: mod_base = OTHER; note = N1-methylpseudouracil
  modified_base 311: mod_base = OTHER; note = N1-methylpseudouracil
  modified_base 313: mod_base = OTHER; note = N1-methylpseudouracil
  modified_base 315: mod_base = OTHER; note = N1-methylpseudouracil
  modified_base 320: mod_base = OTHER; note = N1-methylpseudouracil
  modified_base 326: mod_base = OTHER; note = N1-methylpseudouracil
  modified_base 329: mod_base = OTHER; note = N1-methylpseudouracil
  modified_base 344: mod_base = OTHER; note = N1-methylpseudouracil
  modified_base 350: mod_base = OTHER; note = N1-methylpseudouracil
  modified_base 351: mod_base = OTHER; note = N1-methylpseudouracil
  modified_base 370: mod_base = OTHER; note = N1-methylpseudouracil
  modified_base 372: mod_base = OTHER; note = N1-methylpseudouracil
  modified_base 377: mod_base = OTHER; note = N1-methylpseudouracil
  modified_base 380: mod_base = OTHER; note = N1-methylpseudouracil
  modified_base 386: mod_base = OTHER; note = N1-methylpseudouracil
  modified_base 401: mod_base = OTHER; note = N1-methylpseudouracil
  modified_base 404: mod_base = OTHER; note = N1-methylpseudouracil
  modified_base 407: mod_base = OTHER; note = N1-methylpseudouracil
  modified_base 413: mod_base = OTHER; note = N1-methylpseudouracil
  modified_base 420: mod_base = OTHER; note = N1-methylpseudouracil
  modified_base 426: mod_base = OTHER; note = N1-methylpseudouracil
  modified_base 437: mod_base = OTHER; note = N1-methylpseudouracil
  modified_base 443: mod_base = OTHER; note = N1-methylpseudouracil
  modified_base 449: mod_base = OTHER; note = N1-methylpseudouracil
  modified_base 466: mod_base = OTHER; note = N1-methylpseudouracil
  modified_base 471: mod_base = OTHER; note = N1-methylpseudouracil
  modified_base 473: mod_base = OTHER; note = N1-methylpseudouracil
  modified_base 479: mod_base = OTHER; note = N1-methylpseudouracil
  modified_base 481: mod_base = OTHER; note = N1-methylpseudouracil
  modified_base 484: mod_base = OTHER; note = N1-methylpseudouracil
  modified_base 488: mod_base = OTHER; note = N1-methylpseudouracil
  modified_base 491: mod_base = OTHER; note = N1-methylpseudouracil
  modified_base 497: mod_base = OTHER; note = N1-methylpseudouracil
  modified_base 499: mod_base = OTHER; note = N1-methylpseudouracil
  modified_base 509: mod_base = OTHER; note = N1-methylpseudouracil
  modified_base 519: mod_base = OTHER; note = N1-methylpseudouracil
  modified_base 521: mod_base = OTHER; note = N1-methylpseudouracil
  modified_base 530: mod_base = OTHER; note = N1-methylpseudouracil
  modified_base 539: mod_base = OTHER; note = N1-methylpseudouracil
  modified_base 551: mod_base = OTHER; note = N1-methylpseudouracil
  modified_base 563: mod_base = OTHER; note = N1-methylpseudouracil
  modified_base 565: mod_base = OTHER; note = N1-methylpseudouracil
  modified_base 572: mod_base = OTHER; note = N1-methylpseudouracil
  modified_base 577: mod_base = OTHER; note = N1-methylpseudouracil
  modified_base 583: mod_base = OTHER; note = N1-methylpseudouracil
  modified_base 584: mod_base = OTHER; note = N1-methylpseudouracil
  modified_base 590: mod_base = OTHER; note = N1-methylpseudouracil
  modified_base 595: mod_base = OTHER; note = N1-methylpseudouracil
  modified_base 596: mod_base = OTHER; note = N1-methylpseudouracil
  modified_base 601: mod_base = OTHER; note = N1-methylpseudouracil
  modified_base 604: mod_base = OTHER; note = N1-methylpseudouracil
  modified_base 605: mod_base = OTHER; note = N1-methylpseudouracil
  modified_base 608: mod_base = OTHER; note = N1-methylpseudouracil
  modified_base 620: mod_base = OTHER; note = N1-methylpseudouracil
  modified_base 628: mod_base = OTHER; note = N1-methylpseudouracil
  modified_base 629: mod_base = OTHER; note = N1-methylpseudouracil
  modified_base 632: mod_base = OTHER; note = N1-methylpseudouracil
  modified_base 645: mod_base = OTHER; note = N1-methylpseudouracil
  modified_base 653: mod_base = OTHER; note = N1-methylpseudouracil
  modified_base 664: mod_base = OTHER; note = N1-methylpseudouracil
  modified_base 674: mod_base = OTHER; note = N1-methylpseudouracil
  modified_base 678: mod_base = OTHER; note = N1-methylpseudouracil
  modified_base 679: mod_base = OTHER; note = N1-methylpseudouracil
  modified_base 682: mod_base = OTHER; note = N1-methylpseudouracil
  modified_base 683: mod_base = OTHER; note = N1-methylpseudouracil
  modified_base 685: mod_base = OTHER; note = N1-methylpseudouracil
  modified_base 689: mod_base = OTHER; note = N1-methylpseudouracil
  modified_base 697: mod_base = OTHER; note = N1-methylpseudouracil
  modified_base 698: mod_base = OTHER; note = N1-methylpseudouracil
  modified_base 703: mod_base = OTHER; note = N1-methylpseudouracil
  modified_base 704: mod_base = OTHER; note = N1-methylpseudouracil
  modified_base 713: mod_base = OTHER; note = N1-methylpseudouracil
  modified_base 716: mod_base = OTHER; note = N1-methylpseudouracil
  modified_base 722: mod_base = OTHER; note = N1-methylpseudouracil
  modified_base 742: mod_base = OTHER; note = N1-methylpseudouracil
  modified_base 743: mod_base = OTHER; note = N1-methylpseudouracil
  modified_base 752: mod_base = OTHER; note = N1-methylpseudouracil
  modified_base 755: mod_base = OTHER; note = N1-methylpseudouracil
  modified_base 770: mod_base = OTHER; note = N1-methylpseudouracil
  modified_base 782: mod_base = OTHER; note = N1-methylpseudouracil
  modified_base 798: mod_base = OTHER; note = N1-methylpseudouracil
  modified_base 802: mod_base = OTHER; note = N1-methylpseudouracil
  modified_base 803: mod_base = OTHER; note = N1-methylpseudouracil
  modified_base 810: mod_base = OTHER; note = N1-methylpseudouracil
  modified_base 812: mod_base = OTHER; note = N1-methylpseudouracil
  modified_base 815: mod_base = OTHER; note = N1-methylpseudouracil
  modified_base 827: mod_base = OTHER; note = N1-methylpseudouracil
  modified_base 829: mod_base = OTHER; note = N1-methylpseudouracil
  modified_base 842: mod_base = OTHER; note = N1-methylpseudouracil
  modified_base 847: mod_base = OTHER; note = N1-methylpseudouracil
  modified_base 863: mod_base = OTHER; note = N1-methylpseudouracil
  modified_base 869: mod_base = OTHER; note = N1-methylpseudouracil
  modified_base 872: mod_base = OTHER; note = N1-methylpseudouracil
  modified_base 875: mod_base = OTHER; note = N1-methylpseudouracil
  modified_base 877: mod_base = OTHER; note = N1-methylpseudouracil
  modified_base 878: mod_base = OTHER; note = N1-methylpseudouracil
  modified_base 881: mod_base = OTHER; note = N1-methylpseudouracil
  modified_base 883: mod_base = OTHER; note = N1-methylpseudouracil
  modified_base 895: mod_base = OTHER; note = N1-methylpseudouracil
  modified_base 901: mod_base = OTHER; note = N1-methylpseudouracil
  modified_base 902: mod_base = OTHER; note = N1-methylpseudouracil
  modified_base 908: mod_base = OTHER; note = N1-methylpseudouracil
  modified_base 920: mod_base = OTHER; note = N1-methylpseudouracil
  modified_base 927: mod_base = OTHER; note = N1-methylpseudouracil
  modified_base 929: mod_base = OTHER; note = N1-methylpseudouracil
  modified_base 932: mod_base = OTHER; note = N1-methylpseudouracil
  modified_base 935: mod_base = OTHER; note = N1-methylpseudouracil
  modified_base 939: mod_base = OTHER; note = N1-methylpseudouracil
  modified_base 950: mod_base = OTHER; note = N1-methylpseudouracil
  modified_base 952: mod_base = OTHER; note = N1-methylpseudouracil
  modified_base 959: mod_base = OTHER; note = N1-methylpseudouracil
  modified_base 976: mod_base = OTHER; note = N1-methylpseudouracil
  modified_base 983: mod_base = OTHER; note = N1-methylpseudouracil
  modified_base 992: mod_base = OTHER; note = N1-methylpseudouracil
  modified_base 995: mod_base = OTHER; note = N1-methylpseudouracil
  modified_base 1000: mod_base = OTHER; note = N1-methylpseudouracil
  modified_base 1010: mod_base = OTHER; note = N1-methylpseudouracil
  modified_base 1019: mod_base = OTHER; note = N1-methylpseudouracil
  modified_base 1022: mod_base = OTHER; note = N1-methylpseudouracil
  modified_base 1031: mod_base = OTHER; note = N1-methylpseudouracil
  modified_base 1034: mod_base = OTHER; note = N1-methylpseudouracil
  modified_base 1046: mod_base = OTHER; note = N1-methylpseudouracil
  modified_base 1049: mod_base = OTHER; note = N1-methylpseudouracil
  modified_base 1052: mod_base = OTHER; note = N1-methylpseudouracil
  modified_base 1055: mod_base = OTHER; note = N1-methylpseudouracil
  modified_base 1057: mod_base = OTHER; note = N1-methylpseudouracil
  modified_base 1058: mod_base = OTHER; note = N1-methylpseudouracil
  modified_base 1064: mod_base = OTHER; note = N1-methylpseudouracil
  modified_base 1079: mod_base = OTHER; note = N1-methylpseudouracil
  modified_base 1085: mod_base = OTHER; note = N1-methylpseudouracil
  modified_base 1087: mod_base = OTHER; note = N1-methylpseudouracil
  modified_base 1096: mod_base = OTHER; note = N1-methylpseudouracil
  modified_base 1106: mod_base = OTHER; note = N1-methylpseudouracil
  modified_base 1109: mod_base = OTHER; note = N1-methylpseudouracil
  modified_base 1110: mod_base = OTHER; note = N1-methylpseudouracil
  modified_base 1124: mod_base = OTHER; note = N1-methylpseudouracil
  modified_base 1128: mod_base = OTHER; note = N1-methylpseudouracil
  modified_base 1130: mod_base = OTHER; note = N1-methylpseudouracil
  modified_base 1133: mod_base = OTHER; note = N1-methylpseudouracil
  modified_base 1154: mod_base = OTHER; note = N1-methylpseudouracil
  modified_base 1157: mod_base = OTHER; note = N1-methylpseudouracil
  modified_base 1163: mod_base = OTHER; note = N1-methylpseudouracil
  modified_base 1166: mod_base = OTHER; note = N1-methylpseudouracil
  modified_base 1169: mod_base = OTHER; note = N1-methylpseudouracil
  modified_base 1171: mod_base = OTHER; note = N1-methylpseudouracil
  modified_base 1177: mod_base = OTHER; note = N1-methylpseudouracil
  modified_base 1187: mod_base = OTHER; note = N1-methylpseudouracil
  modified_base 1199: mod_base = OTHER; note = N1-methylpseudouracil
  modified_base 1205: mod_base = OTHER; note = N1-methylpseudouracil
  modified_base 1211: mod_base = OTHER; note = N1-methylpseudouracil
  modified_base 1214: mod_base = OTHER; note = N1-methylpseudouracil
  modified_base 1232: mod_base = OTHER; note = N1-methylpseudouracil
  modified_base 1238: mod_base = OTHER; note = N1-methylpseudouracil
  modified_base 1240: mod_base = OTHER; note = N1-methylpseudouracil
  modified_base 1243: mod_base = OTHER; note = N1-methylpseudouracil
  modified_base 1244: mod_base = OTHER; note = N1-methylpseudouracil
  modified_base 1253: mod_base = OTHER; note = N1-methylpseudouracil
  modified_base 1255: mod_base = OTHER; note = N1-methylpseudouracil
  modified_base 1271: mod_base = OTHER; note = N1-methylpseudouracil
  modified_base 1273: mod_base = OTHER; note = N1-methylpseudouracil
  modified_base 1274: mod_base = OTHER; note = N1-methylpseudouracil
  modified_base 1291: mod_base = OTHER; note = N1-methylpseudouracil
  modified_base 1301: mod_base = OTHER; note = N1-methylpseudouracil
  modified_base 1307: mod_base = OTHER; note = N1-methylpseudouracil
  modified_base 1324: mod_base = OTHER; note = N1-methylpseudouracil
  modified_base 1325: mod_base = OTHER; note = N1-methylpseudouracil
  modified_base 1331: mod_base = OTHER; note = N1-methylpseudouracil
  modified_base 1337: mod_base = OTHER; note = N1-methylpseudouracil
  modified_base 1343: mod_base = OTHER; note = N1-methylpseudouracil
  modified_base 1347: mod_base = OTHER; note = N1-methylpseudouracil
  modified_base 1351: mod_base = OTHER; note = N1-methylpseudouracil
  modified_base 1353: mod_base = OTHER; note = N1-methylpseudouracil
  modified_base 1373: mod_base = OTHER; note = N1-methylpseudouracil
  modified_base 1376: mod_base = OTHER; note = N1-methylpseudouracil
  modified_base 1379: mod_base = OTHER; note = N1-methylpseudouracil
  modified_base 1388: mod_base = OTHER; note = N1-methylpseudouracil
  modified_base 1394: mod_base = OTHER; note = N1-methylpseudouracil
  modified_base 1406: mod_base = OTHER; note = N1-methylpseudouracil
  modified_base 1412: mod_base = OTHER; note = N1-methylpseudouracil
  modified_base 1415: mod_base = OTHER; note = N1-methylpseudouracil
  modified_base 1418: mod_base = OTHER; note = N1-methylpseudouracil
  modified_base 1420: mod_base = OTHER; note = N1-methylpseudouracil
  modified_base 1422: mod_base = OTHER; note = N1-methylpseudouracil
  modified_base 1429: mod_base = OTHER; note = N1-methylpseudouracil
  modified_base 1435: mod_base = OTHER; note = N1-methylpseudouracil
  modified_base 1441: mod_base = OTHER; note = N1-methylpseudouracil
  modified_base 1454: mod_base = OTHER; note = N1-methylpseudouracil
  modified_base 1460: mod_base = OTHER; note = N1-methylpseudouracil
  modified_base 1465: mod_base = OTHER; note = N1-methylpseudouracil
  modified_base 1467: mod_base = OTHER; note = N1-methylpseudouracil
  modified_base 1474: mod_base = OTHER; note = N1-methylpseudouracil
  modified_base 1494: mod_base = OTHER; note = N1-methylpseudouracil
  modified_base 1495: mod_base = OTHER; note = N1-methylpseudouracil
  modified_base 1496: mod_base = OTHER; note = N1-methylpseudouracil
  modified_base 1501: mod_base = OTHER; note = N1-methylpseudouracil
  modified_base 1503: mod_base = OTHER; note = N1-methylpseudouracil
  modified_base 1508: mod_base = OTHER; note = N1-methylpseudouracil
  modified_base 1510: mod_base = OTHER; note = N1-methylpseudouracil
  modified_base 1512: mod_base = OTHER; note = N1-methylpseudouracil
  modified_base 1516: mod_base = OTHER; note = N1-methylpseudouracil
  modified_base 1527: mod_base = OTHER; note = N1-methylpseudouracil
  modified_base 1532: mod_base = OTHER; note = N1-methylpseudouracil
  modified_base 1543: mod_base = OTHER; note = N1-methylpseudouracil
  modified_base 1545: mod_base = OTHER; note = N1-methylpseudouracil
  modified_base 1549: mod_base = OTHER; note = N1-methylpseudouracil
  modified_base 1562: mod_base = OTHER; note = N1-methylpseudouracil
  modified_base 1565: mod_base = OTHER; note = N1-methylpseudouracil
  modified_base 1579: mod_base = OTHER; note = N1-methylpseudouracil
  modified_base 1606: mod_base = OTHER; note = N1-methylpseudouracil
  modified_base 1608: mod_base = OTHER; note = N1-methylpseudouracil
  modified_base 1609: mod_base = OTHER; note = N1-methylpseudouracil
  modified_base 1614: mod_base = OTHER; note = N1-methylpseudouracil
  modified_base 1624: mod_base = OTHER; note = N1-methylpseudouracil
  modified_base 1627: mod_base = OTHER; note = N1-methylpseudouracil
  modified_base 1630: mod_base = OTHER; note = N1-methylpseudouracil
  modified_base 1639: mod_base = OTHER; note = N1-methylpseudouracil
  modified_base 1643: mod_base = OTHER; note = N1-methylpseudouracil
  modified_base 1645: mod_base = OTHER; note = N1-methylpseudouracil
  modified_base 1647: mod_base = OTHER; note = N1-methylpseudouracil
  modified_base 1652: mod_base = OTHER; note = N1-methylpseudouracil
  modified_base 1660: mod_base = OTHER; note = N1-methylpseudouracil
  modified_base 1670: mod_base = OTHER; note = N1-methylpseudouracil
  modified_base 1672: mod_base = OTHER; note = N1-methylpseudouracil
  modified_base 1681: mod_base = OTHER; note = N1-methylpseudouracil
  modified_base 1684: mod_base = OTHER; note = N1-methylpseudouracil
  modified_base 1690: mod_base = OTHER; note = N1-methylpseudouracil
  modified_base 1699: mod_base = OTHER; note = N1-methylpseudouracil
  modified_base 1700: mod_base = OTHER; note = N1-methylpseudouracil
  modified_base 1702: mod_base = OTHER; note = N1-methylpseudouracil
  modified_base 1705: mod_base = OTHER; note = N1-methylpseudouracil
  modified_base 1709: mod_base = OTHER; note = N1-methylpseudouracil
  modified_base 1724: mod_base = OTHER; note = N1-methylpseudouracil
  modified_base 1727: mod_base = OTHER; note = N1-methylpseudouracil
  modified_base 1729: mod_base = OTHER; note = N1-methylpseudouracil
  modified_base 1731: mod_base = OTHER; note = N1-methylpseudouracil
  modified_base 1747: mod_base = OTHER; note = N1-methylpseudouracil
  modified_base 1753: mod_base = OTHER; note = N1-methylpseudouracil
  modified_base 1762: mod_base = OTHER; note = N1-methylpseudouracil
  modified_base 1766: mod_base = OTHER; note = N1-methylpseudouracil
  modified_base 1768: mod_base = OTHER; note = N1-methylpseudouracil
  modified_base 1776: mod_base = OTHER; note = N1-methylpseudouracil
  modified_base 1780: mod_base = OTHER; note = N1-methylpseudouracil
  modified_base 1792: mod_base = OTHER; note = N1-methylpseudouracil
  modified_base 1795: mod_base = OTHER; note = N1-methylpseudouracil
  modified_base 1801: mod_base = OTHER; note = N1-methylpseudouracil
  modified_base 1810: mod_base = OTHER; note = N1-methylpseudouracil
  modified_base 1819: mod_base = OTHER; note = N1-methylpseudouracil
  modified_base 1821: mod_base = OTHER; note = N1-methylpseudouracil
  modified_base 1822: mod_base = OTHER; note = N1-methylpseudouracil
  modified_base 1826: mod_base = OTHER; note = N1-methylpseudouracil
  modified_base 1828: mod_base = OTHER; note = N1-methylpseudouracil
  modified_base 1841: mod_base = OTHER; note = N1-methylpseudouracil
  modified_base 1844: mod_base = OTHER; note = N1-methylpseudouracil
  modified_base 1846: mod_base = OTHER; note = N1-methylpseudouracil
  modified_base 1848: mod_base = OTHER; note = N1-methylpseudouracil
  modified_base 1849: mod_base = OTHER; note = N1-methylpseudouracil
  modified_base 1863: mod_base = OTHER; note = N1-methylpseudouracil
  modified_base 1864: mod_base = OTHER; note = N1-methylpseudouracil
  modified_base 1868: mod_base = OTHER; note = N1-methylpseudouracil
  modified_base 1870: mod_base = OTHER; note = N1-methylpseudouracil
  modified_base 1879: mod_base = OTHER; note = N1-methylpseudouracil
  modified_base 1883: mod_base = OTHER; note = N1-methylpseudouracil
  modified_base 1885: mod_base = OTHER; note = N1-methylpseudouracil
  modified_base 1896: mod_base = OTHER; note = N1-methylpseudouracil
  modified_base 1903: mod_base = OTHER; note = N1-methylpseudouracil
  modified_base 1908: mod_base = OTHER; note = N1-methylpseudouracil
  modified_base 1911: mod_base = OTHER; note = N1-methylpseudouracil
  modified_base 1915: mod_base = OTHER; note = N1-methylpseudouracil
  modified_base 1924: mod_base = OTHER; note = N1-methylpseudouracil
  modified_base 1933: mod_base = OTHER; note = N1-methylpseudouracil
  modified_base 1935: mod_base = OTHER; note = N1-methylpseudouracil
  modified_base 1945: mod_base = OTHER; note = N1-methylpseudouracil
  modified_base 1960: mod_base = OTHER; note = N1-methylpseudouracil
  modified_base 1962: mod_base = OTHER; note = N1-methylpseudouracil
  modified_base 1963: mod_base = OTHER; note = N1-methylpseudouracil
  modified_base 1967: mod_base = OTHER; note = N1-methylpseudouracil
  modified_base 1972: mod_base = OTHER; note = N1-methylpseudouracil
  modified_base 1979: mod_base = OTHER; note = N1-methylpseudouracil
  modified_base 1981: mod_base = OTHER; note = N1-methylpseudouracil
  modified_base 1998: mod_base = OTHER; note = N1-methylpseudouracil
  modified_base 2008: mod_base = OTHER; note = N1-methylpseudouracil
  modified_base 2012: mod_base = OTHER; note = N1-methylpseudouracil
  modified_base 2020: mod_base = OTHER; note = N1-methylpseudouracil
  modified_base 2027: mod_base = OTHER; note = N1-methylpseudouracil
  modified_base 2042: mod_base = OTHER; note = N1-methylpseudouracil
  modified_base 2046: mod_base = OTHER; note = N1-methylpseudouracil
  modified_base 2059: mod_base = OTHER; note = N1-methylpseudouracil
  modified_base 2060: mod_base = OTHER; note = N1-methylpseudouracil
  modified_base 2062: mod_base = OTHER; note = N1-methylpseudouracil
  modified_base 2078: mod_base = OTHER; note = N1-methylpseudouracil
  modified_base 2080: mod_base = OTHER; note = N1-methylpseudouracil
  modified_base 2083: mod_base = OTHER; note = N1-methylpseudouracil
  modified_base 2086: mod_base = OTHER; note = N1-methylpseudouracil
  modified_base 2090: mod_base = OTHER; note = N1-methylpseudouracil
  modified_base 2107: mod_base = OTHER; note = N1-methylpseudouracil
  modified_base 2111: mod_base = OTHER; note = N1-methylpseudouracil
  modified_base 2114: mod_base = OTHER; note = N1-methylpseudouracil
  modified_base 2119: mod_base = OTHER; note = N1-methylpseudouracil
  modified_base 2120: mod_base = OTHER; note = N1-methylpseudouracil
  modified_base 2123: mod_base = OTHER; note = N1-methylpseudouracil
  modified_base 2126: mod_base = OTHER; note = N1-methylpseudouracil
  modified_base 2153: mod_base = OTHER; note = N1-methylpseudouracil
  modified_base 2156: mod_base = OTHER; note = N1-methylpseudouracil
  modified_base 2161: mod_base = OTHER; note = N1-methylpseudouracil
  modified_base 2165: mod_base = OTHER; note = N1-methylpseudouracil
  modified_base 2179: mod_base = OTHER; note = N1-methylpseudouracil
  modified_base 2193: mod_base = OTHER; note = N1-methylpseudouracil
  modified_base 2198: mod_base = OTHER; note = N1-methylpseudouracil
  modified_base 2204: mod_base = OTHER; note = N1-methylpseudouracil
  modified_base 2207: mod_base = OTHER; note = N1-methylpseudouracil
  modified_base 2210: mod_base = OTHER; note = N1-methylpseudouracil
  modified_base 2213: mod_base = OTHER; note = N1-methylpseudouracil
  modified_base 2219: mod_base = OTHER; note = N1-methylpseudouracil
  modified_base 2225: mod_base = OTHER; note = N1-methylpseudouracil
  modified_base 2231: mod_base = OTHER; note = N1-methylpseudouracil
  modified_base 2234: mod_base = OTHER; note = N1-methylpseudouracil
  modified_base 2237: mod_base = OTHER; note = N1-methylpseudouracil
  modified_base 2240: mod_base = OTHER; note = N1-methylpseudouracil
  modified_base 2246: mod_base = OTHER; note = N1-methylpseudouracil
  modified_base 2249: mod_base = OTHER; note = N1-methylpseudouracil
  modified_base 2252: mod_base = OTHER; note = N1-methylpseudouracil
  modified_base 2255: mod_base = OTHER; note = N1-methylpseudouracil
  modified_base 2257: mod_base = OTHER; note = N1-methylpseudouracil
  modified_base 2261: mod_base = OTHER; note = N1-methylpseudouracil
  modified_base 2263: mod_base = OTHER; note = N1-methylpseudouracil
  modified_base 2270: mod_base = OTHER; note = N1-methylpseudouracil
  modified_base 2273: mod_base = OTHER; note = N1-methylpseudouracil
  modified_base 2276: mod_base = OTHER; note = N1-methylpseudouracil
  modified_base 2278: mod_base = OTHER; note = N1-methylpseudouracil
  modified_base 2281: mod_base = OTHER; note = N1-methylpseudouracil
  modified_base 2282: mod_base = OTHER; note = N1-methylpseudouracil
  modified_base 2300: mod_base = OTHER; note = N1-methylpseudouracil
  modified_base 2308: mod_base = OTHER; note = N1-methylpseudouracil
  modified_base 2309: mod_base = OTHER; note = N1-methylpseudouracil
  modified_base 2323: mod_base = OTHER; note = N1-methylpseudouracil
  modified_base 2325: mod_base = OTHER; note = N1-methylpseudouracil
  modified_base 2335: mod_base = OTHER; note = N1-methylpseudouracil
  modified_base 2355: mod_base = OTHER; note = N1-methylpseudouracil
  modified_base 2357: mod_base = OTHER; note = N1-methylpseudouracil
  modified_base 2359: mod_base = OTHER; note = N1-methylpseudouracil
  modified_base 2368: mod_base = OTHER; note = N1-methylpseudouracil
  modified_base 2380: mod_base = OTHER; note = N1-methylpseudouracil
  modified_base 2381: mod_base = OTHER; note = N1-methylpseudouracil
  modified_base 2390: mod_base = OTHER; note = N1-methylpseudouracil
  modified_base 2395: mod_base = OTHER; note = N1-methylpseudouracil
  modified_base 2420: mod_base = OTHER; note = N1-methylpseudouracil
  modified_base 2426: mod_base = OTHER; note = N1-methylpseudouracil
  modified_base 2428: mod_base = OTHER; note = N1-methylpseudouracil
  modified_base 2437: mod_base = OTHER; note = N1-methylpseudouracil
  modified_base 2439: mod_base = OTHER; note = N1-methylpseudouracil
  modified_base 2450: mod_base = OTHER; note = N1-methylpseudouracil
  modified_base 2457: mod_base = OTHER; note = N1-methylpseudouracil
  modified_base 2462: mod_base = OTHER; note = N1-methylpseudouracil
  modified_base 2465: mod_base = OTHER; note = N1-methylpseudouracil
  modified_base 2471: mod_base = OTHER; note = N1-methylpseudouracil
  modified_base 2476: mod_base = OTHER; note = N1-methylpseudouracil
  modified_base 2482: mod_base = OTHER; note = N1-methylpseudouracil
  modified_base 2490: mod_base = OTHER; note = N1-methylpseudouracil
  modified_base 2500: mod_base = OTHER; note = N1-methylpseudouracil
  modified_base 2503: mod_base = OTHER; note = N1-methylpseudouracil
  modified_base 2512: mod_base = OTHER; note = N1-methylpseudouracil
  modified_base 2514: mod_base = OTHER; note = N1-methylpseudouracil
  modified_base 2516: mod_base = OTHER; note = N1-methylpseudouracil
  modified_base 2521: mod_base = OTHER; note = N1-methylpseudouracil
  modified_base 2523: mod_base = OTHER; note = N1-methylpseudouracil
  modified_base 2524: mod_base = OTHER; note = N1-methylpseudouracil
  modified_base 2532: mod_base = OTHER; note = N1-methylpseudouracil
  modified_base 2542: mod_base = OTHER; note = N1-methylpseudouracil
  modified_base 2545: mod_base = OTHER; note = N1-methylpseudouracil
  modified_base 2546: mod_base = OTHER; note = N1-methylpseudouracil
  modified_base 2549: mod_base = OTHER; note = N1-methylpseudouracil
  modified_base 2551: mod_base = OTHER; note = N1-methylpseudouracil
  modified_base 2559: mod_base = OTHER; note = N1-methylpseudouracil
  modified_base 2560: mod_base = OTHER; note = N1-methylpseudouracil
  modified_base 2563: mod_base = OTHER; note = N1-methylpseudouracil
  modified_base 2579: mod_base = OTHER; note = N1-methylpseudouracil
  modified_base 2580: mod_base = OTHER; note = N1-methylpseudouracil
  modified_base 2582: mod_base = OTHER; note = N1-methylpseudouracil
  modified_base 2588: mod_base = OTHER; note = N1-methylpseudouracil
  modified_base 2593: mod_base = OTHER; note = N1-methylpseudouracil
  modified_base 2596: mod_base = OTHER; note = N1-methylpseudouracil
  modified_base 2598: mod_base = OTHER; note = N1-methylpseudouracil
  modified_base 2599: mod_base = OTHER; note = N1-methylpseudouracil
  modified_base 2600: mod_base = OTHER; note = N1-methylpseudouracil
  modified_base 2604: mod_base = OTHER; note = N1-methylpseudouracil
  modified_base 2609: mod_base = OTHER; note = N1-methylpseudouracil
  modified_base 2611: mod_base = OTHER; note = N1-methylpseudouracil
  modified_base 2615: mod_base = OTHER; note = N1-methylpseudouracil
ggaaatcgcaaaatttgctcttcgcgttagatttcttttagttttctcgcaactagcaagctttttgttctcgccatggggatcgagctgctgtgcctgttcttcctgttcctgggacggaacgaccacgtgcagggtggctgcgcccttggtggggcagagacctgcgaggactgcctgctcatcggcccacagtgcgcctggtgcgctcaggagaacttcacccaccccagcggagtgggcgagaggtgcgacaccccggccaacctgctggccaaggggtgccagctgaacttcatcgagaaccccgtctctcaggtggagatcctgaagaacaagcccctcagcgttgggcggcagaagaacagctctgacatcgtgcagatcgcgccccagagcctgatcctgaaactacggcctggcggtgcgcaaaccctgcaggtccacgtgcggcagaccgaggactaccctgtggacctgtactacctgatggacctctccgccagcatggacgacgatctgaacaccatcaaggagctgggcagccgcctgagcaaggagatgtccaagctgacctccaacttccgcctggggttcggatccttcgtggagaagcccgtgagccccttcgtgaagaccacccctgaggagatcgccaacccctgcagcagcatcccttacttctgcctgcccaccttcggcttcaagcacatcctgccactgaccaacgacgccgagcggttcaacgagatcgtgaagaaccagaagatcagcgccaacatcgacaccccggagggtgggttcgacgctatcatgcaggccgccgtgtgcaaggagaagatcggctggcgcaacgacagcctgcacctgctggtgttcgtgtccgacgccgactcccacttcggcatggacagcaagctggccggtatcgtgatccctaacgacggcctgtgccacctggacagcaagaacgagtacagcatgagcaccgtgctggagtaccccaccatcggccagctgatcgacaagctggtgcagaacaacgtgctgctgatcttcgccgtgacccaggagcaggtgcacctctacgagaactacgccaagctgattccaggcgccaccgtcggtctgctgcagaaggacagcggcaacatcctgcagctgatcatctccgcctacgaggagctgaggagcgaggtggagctggaggtgctcggggacaccgagggcctgaacctgtccttcaccgccatctgcaacaacgggaccctcttccagcaccagaagaagtgcagccacatgaaggtgggcgacaccgccagcttcagcgtcaccgtgaacatacctcactgtgagcggcggagcaggcacatcatcatcaagcccgtgggcctgggagacgccctggagctgctggtgtctcccgagtgcaactgcgactgccagaaggaggtggaggtgaactctagcaagtgccaccacggcaacgggagtttccagtgtggcgtgtgtgcctgccaccccggtcacatgggaccccggtgtgagtgcggggaggacatgctgagcaccgacagctgcaaggaggccccagaccacccgagctgttccggtcggggcgactgctactgcggccagtgcatctgtcacctgagcccctacggcaacatctacgggccctactgccagtgcgacaacttctcctgcgtgcgccacaaaggcctgctgtgtggcggcaacggcgactgcgactgcggggagtgcgtgtgccgcagtgggtggaccggcgagtactgcaactgcaccacctccaccgactcttgcgtgtccgaggacggggtgctgtgttccgggcgcggagattgcgtgtgcgggaagtgcgtgtgcaccaaccctggcgcatcgggtcctacctgcgagaggtgccccacctgtggcgacccctgcaacagcaagcgctcttgcatcgagtgccacctctcagcagcagggcaggctcgggaggagtgcgtggacaagtgcaagctcgccggcgccaccatcagtgaggaggaggacttctccaaggacggcagcgtgtcctgctccctccagggcgagaacgagtgcctcatcaccttcctgatcaccaccgacaacgagggcaagaccatcatccactccatcaacgagaaggactgccccaagccgcctaacatccccatgatcatgctgggcgtgagcctggccatcctgctgatcggcgtggtgctgctgtgcatctggaagctgctggtctccttccacgaccgcaaggaggtggccaagttcgaggccgagcgctctaaggccaagtggcagaccggcaccaaccctctgtaccggggctccaccagcaccttcaagaacgtgacctacaagcaccgcgagaagcagaaggtggacctgtccaccgactgtggcaagcccatccccaatcccctgctggggctggactccacctaagcccctccgggggcctcctgagagacctgtgtgaactattgagaagatcggaacagctccttactctgaggaagttggtaccccccaaacaccattgtcacactccagtggtctttgaataaagtctgagtgggcggc

SEQ ID NO: 165 - RNA, 2622 nt, unidentified
  source 1..2622: mol_type = unassigned RNA
  modified_base 6: mod_base = OTHER; note = N1-methylpseudouracil
  modified_base 14: mod_base = OTHER; note = N1-methylpseudouracil
  modified_base 15: mod_base = OTHER; note = N1-methylpseudouracil
  modified_base 16: mod_base = OTHER; note = N1-methylpseudouracil
  modified_base 19: mod_base = OTHER; note = N1-methylpseudouracil
  modified_base 21: mod_base = OTHER; note = N1-methylpseudouracil
  modified_base 22: mod_base = OTHER; note = N1-methylpseudouracil
  modified_base 27: mod_base = OTHER; note = N1-methylpseudouracil
  modified_base 28: mod_base = OTHER; note = N1-methylpseudouracil
  modified_base 32: mod_base = OTHER; note = N1-methylpseudouracil
  modified_base 33: mod_base = OTHER; note = N1-methylpseudouracil
  modified_base 34: mod_base = OTHER; note = N1-methylpseudouracil
  modified_base 36: mod_base = OTHER; note = N1-methylpseudouracil
  modified_base 37: mod_base = OTHER; note = N1-methylpseudouracil
  modified_base 38: mod_base = OTHER; note = N1-methylpseudouracil
  modified_base 39: mod_base = OTHER; note = N1-methylpseudouracil
  modified_base 42: mod_base = OTHER; note = N1-methylpseudouracil
  modified_base 43: mod_base = OTHER; note = N1-methylpseudouracil
  modified_base 44: mod_base = OTHER; note = N1-methylpseudouracil
  modified_base 45: mod_base = OTHER; note = N1-methylpseudouracil
  modified_base 47: mod_base = OTHER; note = N1-methylpseudouracil
  modified_base 54: mod_base = OTHER; note = N1-methylpseudouracil
  modified_base 62: mod_base = OTHER; note = N1-methylpseudouracil
  modified_base 63: mod_base = OTHER; note = N1-methylpseudouracil
  modified_base 64: mod_base = OTHER; note = N1-methylpseudouracil
  modified_base 65: mod_base = OTHER; note = N1-methylpseudouracil
  modified_base 66: mod_base = OTHER; note = N1-methylpseudouracil
  modified_base 68: mod_base = OTHER; note = N1-methylpseudouracil
  modified_base 69: mod_base = OTHER; note = N1-methylpseudouracil
  modified_base 71: mod_base = OTHER; note = N1-methylpseudouracil
  modified_base 77: mod_base = OTHER; note = N1-methylpseudouracil
  modified_base 81: mod_base = OTHER; note = N1-methylpseudouracil
  modified_base 83: mod_base = OTHER; note = N1-methylpseudouracil
  modified_base 89: mod_base = OTHER; note = N1-methylpseudouracil
  modified_base 92: mod_base = OTHER; note = N1-methylpseudouracil
  modified_base 94: mod_base = OTHER; note = N1-methylpseudouracil
  modified_base 96: mod_base = OTHER; note = N1-methylpseudouracil
  modified_base 98: mod_base = OTHER; note = N1-methylpseudouracil
  modified_base 100: mod_base = OTHER; note = N1-methylpseudouracil
  modified_base 101: mod_base = OTHER; note = N1-methylpseudouracil
  modified_base 103: mod_base = OTHER; note = N1-methylpseudouracil
  modified_base 104: mod_base = OTHER; note = N1-methylpseudouracil
  modified_base 105: mod_base = OTHER; note = N1-methylpseudouracil
  modified_base 107: mod_base = OTHER; note = N1-methylpseudouracil
  modified_base 109: mod_base = OTHER; note = N1-methylpseudouracil
  modified_base 110: mod_base = OTHER; note = N1-methylpseudouracil
  modified_base 111: mod_base = OTHER; note = N1-methylpseudouracil
  modified_base 113: mod_base = OTHER; note = N1-methylpseudouracil
  modified_base 131: mod_base = OTHER; note = N1-methylpseudouracil
  modified_base 142: mod_base = OTHER; note = N1-methylpseudouracil
  modified_base 149: mod_base = OTHER; note = N1-methylpseudouracil
  modified_base 166: mod_base = OTHER; note = N1-methylpseudouracil
  modified_base 175: mod_base = OTHER; note = N1-methylpseudouracil
  modified_base 179: mod_base = OTHER; note = N1-methylpseudouracil
  modified_base 182: mod_base = OTHER; note = N1-methylpseudouracil
  modified_base 185: mod_base = OTHER; note = N1-methylpseudouracil
  modified_base 196: mod_base = OTHER; note = N1-methylpseudouracil
  modified_base 198: mod_base = OTHER; note = N1-methylpseudouracil
  modified_base 202: mod_base = OTHER; note = N1-methylpseudouracil
  modified_base 205: mod_base = OTHER; note = N1-methylpseudouracil
  modified_base 207: mod_base = OTHER; note = N1-methylpseudouracil
  modified_base 220: mod_base = OTHER; note = N1-methylpseudouracil
  modified_base 221: mod_base = OTHER; note = N1-methylpseudouracil
  modified_base 239: mod_base = OTHER; note = N1-methylpseudouracil
  modified_base 250: mod_base = OTHER; note = N1-methylpseudouracil
  modified_base 261: mod_base = OTHER; note = N1-methylpseudouracil
  modified_base 267: mod_base = OTHER; note = N1-methylpseudouracil
  modified_base 269: mod_base = OTHER; note = N1-methylpseudouracil
  modified_base 272: mod_base = OTHER; note = N1-methylpseudouracil
  modified_base 283: mod_base = OTHER; note = N1-methylpseudouracil
  modified_base 290: mod_base = OTHER; note = N1-methylpseudouracil
  modified_base 294: mod_base = OTHER; note = N1-methylpseudouracil
  modified_base 295: mod_base = OTHER; note = N1-methylpseudouracil
  modified_base 296: mod_base = OTHER; note = N1-methylpseudouracil
  modified_base 299: mod_base = OTHER; note = N1-methylpseudouracil
  modified_base 306: mod_base = OTHER; note = N1-methylpseudouracil
  modified_base 311: mod_base = OTHER; note = N1-methylpseudouracil
  modified_base 320: mod_base = OTHER; note = N1-methylpseudouracil
  modified_base 326: mod_base = OTHER; note = N1-methylpseudouracil
  modified_base 327: mod_base = OTHER; note = N1-methylpseudouracil
  modified_base 329: mod_base = OTHER; note = N1-methylpseudouracil
  modified_base 342: mod_base = OTHER; note = N1-methylpseudouracil
  modified_base 344: mod_base = OTHER; note = N1-methylpseudouracil
  modified_base 350: mod_base = OTHER; note = N1-methylpseudouracil
  modified_base 367: mod_base = OTHER; note = N1-methylpseudouracil
  modified_base 369: mod_base = OTHER; note = N1-methylpseudouracil
  modified_base 370: mod_base = OTHER; note = N1-methylpseudouracil
  modified_base 372: mod_base = OTHER; note = N1-methylpseudouracil
  modified_base 377: mod_base = OTHER; note = N1-methylpseudouracil
  modified_base 380: mod_base = OTHER; note = N1-methylpseudouracil
  modified_base 386: mod_base = OTHER; note = N1-methylpseudouracil
  modified_base 393: mod_base = OTHER; note = N1-methylpseudouracil
  modified_base 401: mod_base = OTHER; note = N1-methylpseudouracil
  modified_base 404: mod_base = OTHER; note = N1-methylpseudouracil
  modified_base 405: mod_base = OTHER; note = N1-methylpseudouracil
  modified_base 407: mod_base = OTHER; note = N1-methylpseudouracil
  modified_base 413: mod_base = OTHER; note = N1-methylpseudouracil
  modified_base 429: mod_base = OTHER; note = N1-methylpseudouracil
  modified_base 437: mod_base = OTHER; note = N1-methylpseudouracil
  modified_base 443: mod_base = OTHER; note = N1-methylpseudouracil
  modified_base 449: mod_base = OTHER; note = N1-methylpseudouracil
  modified_base 459: mod_base = OTHER; note = N1-methylpseudouracil
  modified_base 466: mod_base = OTHER; note = N1-methylpseudouracil
  modified_base 473: mod_base = OTHER; note = N1-methylpseudouracil
  modified_base 479: mod_base = OTHER; note = N1-methylpseudouracil
  modified_base 481: mod_base = OTHER; note = N1-methylpseudouracil
  modified_base 484: mod_base = OTHER; note = N1-methylpseudouracil
  modified_base 488: mod_base = OTHER; note = N1-methylpseudouracil
  modified_base 491: mod_base = OTHER; note = N1-methylpseudouracil
  modified_base 495: mod_base = OTHER; note = N1-methylpseudouracil
  modified_base 497: mod_base = OTHER; note = N1-methylpseudouracil
  modified_base 499: mod_base = OTHER; note = N1-methylpseudouracil
  modified_base 509: mod_base = OTHER; note = N1-methylpseudouracil
  modified_base 519: mod_base = OTHER; note = N1-methylpseudouracil
  modified_base 521: mod_base = OTHER; note = N1-methylpseudouracil
  modified_base 530: mod_base = OTHER; note = N1-methylpseudouracil
  modified_base 531: mod_base = OTHER; note = N1-methylpseudouracil
  modified_base 539: mod_base = OTHER; note = N1-methylpseudouracil
  modified_base 551: mod_base = OTHER; note = N1-methylpseudouracil
  modified_base 553: mod_base = OTHER; note = N1-methylpseudouracil
  modified_base 555: mod_base = OTHER; note = N1-methylpseudouracil
  modified_base 563: mod_base = OTHER; note = N1-methylpseudouracil
  modified_base 565: mod_base = OTHER; note = N1-methylpseudouracil
  modified_base 572: mod_base = OTHER; note = N1-methylpseudouracil
  modified_base 583: mod_base = OTHER; note = N1-methylpseudouracil
  modified_base 584: mod_base = OTHER; note = N1-methylpseudouracil
  modified_base 590: mod_base = OTHER; note = N1-methylpseudouracil
  modified_base 595: mod_base = OTHER; note = N1-methylpseudouracil
  modified_base 596: mod_base = OTHER; note = N1-methylpseudouracil
  modified_base 604: mod_base = OTHER; note = N1-methylpseudouracil
  modified_base 605: mod_base = OTHER; note = N1-methylpseudouracil
  modified_base 606: mod_base = OTHER; note = N1-methylpseudouracil
  modified_base 608: mod_base = OTHER; note = N1-methylpseudouracil
  modified_base 618: mod_base = OTHER; note = N1-methylpseudouracil
  modified_base 620: mod_base = OTHER; note = N1-methylpseudouracil
  modified_base 622: mod_base = OTHER; note = N1-methylpseudouracil
  modified_base 624: mod_base = OTHER; note = N1-methylpseudouracil
  modified_base 627: mod_base = OTHER; note = N1-methylpseudouracil
  modified_base 628: mod_base = OTHER; note = N1-methylpseudouracil
  modified_base 629: mod_base = OTHER; note = N1-methylpseudouracil
  modified_base 632: mod_base = OTHER; note = N1-methylpseudouracil
  modified_base 653: mod_base = OTHER; note = N1-methylpseudouracil
  modified_base 664: mod_base = OTHER; note = N1-methylpseudouracil
  modified_base 666: mod_base = OTHER; note = N1-methylpseudouracil
  modified_base 674: mod_base = OTHER; note = N1-methylpseudouracil
  modified_base 679: mod_base = OTHER; note = N1-methylpseudouracil
  modified_base 682: mod_base = OTHER; note = N1-methylpseudouracil
  modified_base 683: mod_base = OTHER; note = N1-methylpseudouracil
  modified_base 685: mod_base = OTHER; note = N1-methylpseudouracil
  modified_base 689: mod_base = OTHER; note = N1-methylpseudouracil
  modified_base 693: mod_base = OTHER; note = N1-methylpseudouracil
  modified_base 697: mod_base = OTHER; note = N1-methylpseudouracil
  modified_base 698: mod_base = OTHER; note = N1-methylpseudouracil
  modified_base 703: mod_base = OTHER; note = N1-methylpseudouracil
  modified_base 704: mod_base = OTHER; note = N1-methylpseudouracil
  modified_base 713: mod_base = OTHER; note = N1-methylpseudouracil
  modified_base 714: mod_base = OTHER; note = N1-methylpseudouracil
  modified_base 716: mod_base = OTHER; note = N1-methylpseudouracil
  modified_base 720: mod_base = OTHER; note = N1-methylpseudouracil
  modified_base 722: mod_base = OTHER; note = N1-methylpseudouracil
  modified_base 742: mod_base = OTHER; note = N1-methylpseudouracil
  modified_base 743: mod_base = OTHER; note = N1-methylpseudouracil
  modified_base 744: mod_base = OTHER; note = N1-methylpseudouracil
  modified_base 752: mod_base = OTHER; note = N1-methylpseudouracil
  modified_base 755: mod_base = OTHER; note = N1-methylpseudouracil
  modified_base 762: mod_base = OTHER; note = N1-methylpseudouracil
  modified_base 770: mod_base = OTHER; note = N1-methylpseudouracil
  modified_base 782: mod_base = OTHER; note = N1-methylpseudouracil
  modified_base 783: mod_base = OTHER; note = N1-methylpseudouracil
  modified_base 786: mod_base = OTHER; note = N1-methylpseudouracil
  modified_base 789: mod_base = OTHER; note = N1-methylpseudouracil
  modified_base 792: mod_base = OTHER; note = N1-methylpseudouracil
  modified_base 802: mod_base = OTHER; note = N1-methylpseudouracil
  modified_base 803: mod_base = OTHER; note = N1-methylpseudouracil
  modified_base 812: mod_base = OTHER; note = N1-methylpseudouracil
  modified_base 815: mod_base = OTHER; note = N1-methylpseudouracil
  modified_base 822: mod_base = OTHER; note = N1-methylpseudouracil
  modified_base 827: mod_base = OTHER; note = N1-methylpseudouracil
  modified_base 829: mod_base = OTHER; note = N1-methylpseudouracil
  modified_base 842: mod_base = OTHER; note = N1-methylpseudouracil
  modified_base 847: mod_base = OTHER; note = N1-methylpseudouracil
  modified_base 863: mod_base = OTHER; note = N1-methylpseudouracil
  modified_base 869: mod_base = OTHER; note = N1-methylpseudouracil
  modified_base 872: mod_base = OTHER; note = N1-methylpseudouracil
  modified_base 875: mod_base = OTHER; note = N1-methylpseudouracil
  modified_base 877: mod_base = OTHER; note = N1-methylpseudouracil
  modified_base 878: mod_base = OTHER; note = N1-methylpseudouracil
  modified_base 881: mod_base = OTHER; note = N1-methylpseudouracil
  modified_base 901: mod_base = OTHER; note = N1-methylpseudouracil
  modified_base 902: mod_base = OTHER; note = N1-methylpseudouracil
  modified_base 903: mod_base = OTHER; note = N1-methylpseudouracil
  modified_base 908: mod_base = OTHER; note = N1-methylpseudouracil
  modified_base 913: mod_base = OTHER; note = N1-methylpseudouracil
  modified_base 920: mod_base = OTHER; note = N1-methylpseudouracil
  modified_base 929: mod_base = OTHER; note = N1-methylpseudouracil
  modified_base 932: mod_base = OTHER; note = N1-methylpseudouracil
  modified_base 935: mod_base = OTHER; note = N1-methylpseudouracil
  modified_base 950: mod_base = OTHER; note = N1-methylpseudouracil
  modified_base 952: mod_base = OTHER; note = N1-methylpseudouracil
  modified_base 954: mod_base = OTHER; note = N1-methylpseudouracil
  modified_base 959: mod_base = OTHER; note = N1-methylpseudouracil
  modified_base 963: mod_base = OTHER; note = N1-methylpseudouracil
  modified_base 964: mod_base = OTHER; note = N1-methylpseudouracil
  modified_base 976: mod_base = OTHER; note = N1-methylpseudouracil
  modified_base 983: mod_base = OTHER; note = N1-methylpseudouracil
  modified_base 992: mod_base = OTHER; note = N1-methylpseudouracil
  modified_base 995: mod_base = OTHER; note = N1-methylpseudouracil
  modified_base 1000: mod_base = OTHER; note = N1-methylpseudouracil
  modified_base 1010: mod_base = OTHER; note = N1-methylpseudouracil
  modified_base 1011: mod_base = OTHER; note = N1-methylpseudouracil
  modified_base 1019: mod_base = OTHER; note = N1-methylpseudouracil
  modified_base 1022: mod_base = OTHER; note = N1-methylpseudouracil
  modified_base 1023: mod_base = OTHER; note = N1-methylpseudouracil
  modified_base 1026: mod_base = OTHER; note = N1-methylpseudouracil
  modified_base 1031: mod_base = OTHER; note = N1-methylpseudouracil
  modified_base 1034: mod_base = OTHER; note = N1-methylpseudouracil
  modified_base 1046: mod_base = OTHER; note = N1-methylpseudouracil
  modified_base 1049: mod_base = OTHER; note = N1-methylpseudouracil
  modified_base 1052: mod_base = OTHER; note = N1-methylpseudouracil
  modified_base 1055: mod_base = OTHER; note = N1-methylpseudouracil
  modified_base 1057: mod_base = OTHER; note = N1-methylpseudouracil
  modified_base 1058: mod_base = OTHER; note = N1-methylpseudouracil
  modified_base 1059: mod_base = OTHER; note = N1-methylpseudouracil
  modified_base 1064: mod_base = OTHER; note = N1-methylpseudouracil
  modified_base 1079: mod_base = OTHER; note = N1-methylpseudouracil
  modified_base 1085: mod_base = OTHER; note = N1-methylpseudouracil
  modified_base 1087: mod_base = OTHER; note = N1-methylpseudouracil
  modified_base 1095: mod_base = OTHER; note = N1-methylpseudouracil
  modified_base 1096: mod_base = OTHER; note = N1-methylpseudouracil
  modified_base 1106: mod_base = OTHER; note = N1-methylpseudouracil
  modified_base 1109: mod_base = OTHER; note = N1-methylpseudouracil
  modified_base 1122: mod_base = OTHER; note = N1-methylpseudouracil
  modified_base 1124: mod_base = OTHER; note = N1-methylpseudouracil
  modified_base 1130: mod_base = OTHER; note = N1-methylpseudouracil
  modified_base 1133: mod_base = OTHER; note = N1-methylpseudouracil
  modified_base 1144: mod_base = OTHER; note = N1-methylpseudouracil
  modified_base 1154: mod_base = OTHER; note = N1-methylpseudouracil
  modified_base 1157: mod_base = OTHER; note = N1-methylpseudouracil
  modified_base 1163: mod_base = OTHER; note = N1-methylpseudouracil
  modified_base 1166: mod_base = OTHER; note = N1-methylpseudouracil
  modified_base 1169: mod_base = OTHER; note = N1-methylpseudouracil
  modified_base 1171: mod_base = OTHER; note = N1-methylpseudouracil
  modified_base 1177: mod_base = OTHER; note = N1-methylpseudouracil
  modified_base 1187: mod_base = OTHER; note = N1-methylpseudouracil
  modified_base 1199: mod_base = OTHER; note = N1-methylpseudouracil
  modified_base 1205: mod_base = OTHER; note = N1-methylpseudouracil
  modified_base 1211: mod_base = OTHER; note = N1-methylpseudouracil
  modified_base 1214: mod_base = OTHER; note = N1-methylpseudouracil
  modified_base 1232: mod_base = OTHER; note = N1-methylpseudouracil
  modified_base 1238: mod_base = OTHER; note = N1-methylpseudouracil
  modified_base 1243: mod_base = OTHER; note = N1-methylpseudouracil
  modified_base 1244: mod_base = OTHER; note = N1-methylpseudouracil
  modified_base 1245: mod_base = OTHER; note = N1-methylpseudouracil
  modified_base 1253: mod_base = OTHER; note = N1-methylpseudouracil
  modified_base 1255: mod_base = OTHER; note = N1-methylpseudouracil
  modified_base 1257: mod_base = OTHER; note = N1-methylpseudouracil
  modified_base 1269: mod_base = OTHER; note = N1-methylpseudouracil
  modified_base 1271: mod_base = OTHER; note = N1-methylpseudouracil
  modified_base 1273: mod_base = OTHER; note = N1-methylpseudouracil
  modified_base 1274: mod_base = OTHER; note = N1-methylpseudouracil
  modified_base 1291: mod_base = OTHER; note = N1-methylpseudouracil
  modified_base 1294: mod_base = OTHER; note = N1-methylpseudouracil
  modified_base 1296: mod_base = OTHER; note = N1-methylpseudouracil
  modified_base 1301: mod_base = OTHER; note = N1-methylpseudouracil
  modified_base 1307: mod_base = OTHER; note = N1-methylpseudouracil
  modified_base 1321: mod_base = OTHER; note = N1-methylpseudouracil
  modified_base 1324: mod_base = OTHER; note = N1-methylpseudouracil
  modified_base 1325: mod_base = OTHER; note = N1-methylpseudouracil
  modified_base 1331: mod_base = OTHER; note = N1-methylpseudouracil
  modified_base 1337: mod_base = OTHER; note = N1-methylpseudouracil
  modified_base 1343: mod_base = OTHER; note = N1-methylpseudouracil
  modified_base 1347: mod_base = OTHER; note = N1-methylpseudouracil
  modified_base 1351: mod_base = OTHER; note = N1-methylpseudouracil
  modified_base 1353: mod_base = OTHER; note = N1-methylpseudouracil
  modified_base 1373: mod_base = OTHER; note = N1-methylpseudouracil
  modified_base 1376: mod_base = OTHER; note = N1-methylpseudouracil
  modified_base 1379: mod_base = OTHER; note = N1-methylpseudouracil
  modified_base 1388: mod_base = OTHER; note = N1-methylpseudouracil
  modified_base 1394: mod_base = OTHER; note = N1-methylpseudouracil
  modified_base 1406: mod_base = OTHER; note = N1-methylpseudouracil
  modified_base 1412: mod_base = OTHER; note = N1-methylpseudouracil
  modified_base 1415: mod_base = OTHER; note = N1-methylpseudouracil
  modified_base 1418: mod_base = OTHER; note = N1-methylpseudouracil
  modified_base 1420: mod_base = OTHER; note = N1-methylpseudouracil
  modified_base 1425: mod_base = OTHER; note = N1-methylpseudouracil
  modified_base 1429: mod_base = OTHER; note = N1-methylpseudouracil
  modified_base 1431: mod_base = OTHER; note = N1-methylpseudouracil
  modified_base 1435: mod_base = OTHER; note = N1-methylpseudouracil
  modified_base 1441: mod_base = OTHER; note = N1-methylpseudouracil
  modified_base 1454: mod_base = OTHER; note = N1-methylpseudouracil
  modified_base 1460: mod_base = OTHER; note = N1-methylpseudouracil
  modified_base 1468: mod_base = OTHER; note = N1-methylpseudouracil
  modified_base 1470: mod_base = OTHER; note = N1-methylpseudouracil
  modified_base 1474: mod_base = OTHER; note = N1-methylpseudouracil
  modified_base 1495: mod_base = OTHER; note = N1-methylpseudouracil
  modified_base 1496: mod_base = OTHER; note = N1-methylpseudouracil
  modified_base 1501: mod_base = OTHER; note = N1-methylpseudouracil
  modified_base 1508: mod_base = OTHER; note = N1-methylpseudouracil
  modified_base 1510: mod_base = OTHER; note = N1-methylpseudouracil
  modified_base 1516: mod_base = OTHER; note = N1-methylpseudouracil
  modified_base 1532: mod_base = OTHER; note = N1-methylpseudouracil
  modified_base 1539: mod_base = OTHER; note = N1-methylpseudouracil
  modified_base 1543: mod_base = OTHER; note = N1-methylpseudouracil
  modified_base 1549: mod_base = OTHER; note = N1-methylpseudouracil
  modified_base 1562: mod_base = OTHER; note = N1-methylpseudouracil
  modified_base 1565: mod_base = OTHER; note = N1-methylpseudouracil
  modified_base 1567: mod_base = OTHER; note = N1-methylpseudouracil
  modified_base 1569: mod_base = OTHER; note = N1-methylpseudouracil
  modified_base 1579: mod_base = OTHER; note = N1-methylpseudouracil
  modified_base 1593: mod_base = OTHER; note = N1-methylpseudouracil
  modified_base 1602: mod_base = OTHER; note = N1-methylpseudouracil
  modified_base 1606: mod_base = OTHER; note = N1-methylpseudouracil
  modified_base 1609: mod_base = OTHER; note = N1-methylpseudouracil
  modified_base 1611: mod_base = OTHER; note = N1-methylpseudouracil
  modified_base 1624: mod_base = OTHER; note = N1-methylpseudouracil
  modified_base 1627: mod_base = OTHER; note = N1-methylpseudouracil
  modified_base 1630: mod_base = OTHER; note = N1-methylpseudouracil
  modified_base 1639: mod_base = OTHER; note = N1-methylpseudouracil
  modified_base 1643: mod_base = OTHER; note = N1-methylpseudouracil
  modified_base 1645: mod_base = OTHER; note = N1-methylpseudouracil
  modified_base 1652: mod_base = OTHER; note = N1-methylpseudouracil
  modified_base 1654: mod_base = OTHER; note = N1-methylpseudouracil
  modified_base 1659: mod_base = OTHER; note = N1-methylpseudouracil
  modified_base 1660: mod_base = OTHER; note = N1-methylpseudouracil
  modified_base 1670: mod_base = OTHER; note = N1-methylpseudouracil
  modified_base 1671: mod_base = OTHER; note = N1-methylpseudouracil
  modified_base 1672: mod_base = OTHER; note = N1-methylpseudouracil
  modified_base 1681: mod_base = OTHER; note = N1-methylpseudouracil
  modified_base 1684: mod_base = OTHER; note = N1-methylpseudouracil
  modified_base 1690: mod_base = OTHER; note = N1-methylpseudouracil
  modified_base 1692: mod_base = OTHER; note = N1-methylpseudouracil
  modified_base 1695: mod_base = OTHER; note = N1-methylpseudouracil
  modified_base 1699: mod_base = OTHER; note = N1-methylpseudouracil
  modified_base 1700: mod_base = OTHER; note = N1-methylpseudouracil
  modified_base 1701: mod_base = OTHER; note = N1-methylpseudouracil
  modified_base 1702: mod_base = OTHER; note = N1-methylpseudouracil
  modified_base 1705: mod_base = OTHER; note = N1-methylpseudouracil
  modified_base 1709: mod_base = OTHER; note = N1-methylpseudouracil
  modified_base 1724: mod_base = OTHER; note = N1-methylpseudouracil
  modified_base 1727: mod_base = OTHER; note = N1-methylpseudouracil
  modified_base 1729: mod_base = OTHER; note = N1-methylpseudouracil
  modified_base 1740: mod_base = OTHER; note = N1-methylpseudouracil
  modified_base 1747: mod_base = OTHER; note = N1-methylpseudouracil
  modified_base 1753: mod_base = OTHER; note = N1-methylpseudouracil
  modified_base 1762: mod_base = OTHER; note = N1-methylpseudouracil
  modified_base 1766: mod_base = OTHER; note = N1-methylpseudouracil
  modified_base 1768: mod_base = OTHER; note = N1-methylpseudouracil
  modified_base 1770: mod_base = OTHER; note = N1-methylpseudouracil
  modified_base 1780: mod_base = OTHER; note = N1-methylpseudouracil
  modified_base 1792: mod_base = OTHER; note = N1-methylpseudouracil
  modified_base 1795: mod_base = OTHER; note = N1-methylpseudouracil
  modified_base 1801: mod_base = OTHER; note = N1-methylpseudouracil
  modified_base 1806: mod_base = OTHER; note = N1-methylpseudouracil
  modified_base 1809: mod_base = OTHER; note = N1-methylpseudouracil
  modified_base 1810: mod_base = OTHER; note = N1-methylpseudouracil
  modified_base 1815: mod_base = OTHER; note = N1-methylpseudouracil
  modified_base 1822: mod_base = OTHER; note = N1-methylpseudouracil
  modified_base 1824: mod_base = OTHER; note = N1-methylpseudouracil
  modified_base 1826: mod_base = OTHER; note = N1-methylpseudouracil
  modified_base 1841: mod_base = OTHER; note = N1-methylpseudouracil
  modified_base 1844: mod_base = OTHER; note = N1-methylpseudouracil
  modified_base 1846: mod_base = OTHER; note = N1-methylpseudouracil
  modified_base 1848: mod_base = OTHER; note = N1-methylpseudouracil
  modified_base 1849: mod_base = OTHER; note = N1-methylpseudouracil
  modified_base 1851: mod_base = OTHER; note = N1-methylpseudouracil
  modified_base 1864: mod_base = OTHER; note = N1-methylpseudouracil
  modified_base 1868: mod_base = OTHER; note = N1-methylpseudouracil
  modified_base 1870: mod_base = OTHER; note = N1-methylpseudouracil
  modified_base 1879: mod_base = OTHER; note = N1-methylpseudouracil
  modified_base 1883: mod_base = OTHER; note = N1-methylpseudouracil
  modified_base 1885: mod_base = OTHER; note = N1-methylpseudouracil
  modified_base 1890: mod_base = OTHER; note = N1-methylpseudouracil
  modified_base 1893: mod_base = OTHER; note = N1-methylpseudouracil
  modified_base 1903: mod_base = OTHER; note = N1-methylpseudouracil
  modified_base 1915: mod_base = OTHER; note = N1-methylpseudouracil
  modified_base 1924: mod_base = OTHER; note = N1-methylpseudouracil
  modified_base 1926: mod_base = OTHER; note = N1-methylpseudouracil
  modified_base 1933: mod_base = OTHER; note = N1-methylpseudouracil
  modified_base 1944: mod_base = OTHER; note = N1-methylpseudouracil
  modified_base 1945: mod_base = OTHER; note = N1-methylpseudouracil
  modified_base 1960: mod_base = OTHER; note = N1-methylpseudouracil
  modified_base 1963: mod_base = OTHER; note = N1-methylpseudouracil
  modified_base 1967: mod_base = OTHER; note = N1-methylpseudouracil
  modified_base 1972: mod_base = OTHER; note = N1-methylpseudouracil
  modified_base 1979: mod_base = OTHER; note = N1-methylpseudouracil
  modified_base 1981: mod_base = OTHER; note = N1-methylpseudouracil
  modified_base 2008: mod_base = OTHER; note = N1-methylpseudouracil
  modified_base 2012: mod_base = OTHER; note = N1-methylpseudouracil
  modified_base 2016: mod_base = OTHER; note = N1-methylpseudouracil
  modified_base 2020: mod_base = OTHER; note = N1-methylpseudouracil
  modified_base 2022: mod_base = OTHER; note = N1-methylpseudouracil
  modified_base 2027: mod_base = OTHER; note = N1-methylpseudouracil
  modified_base 2037: mod_base = OTHER; note = N1-methylpseudouracil
  modified_base 2042: mod_base = OTHER; note = N1-methylpseudouracil
  modified_base 2043: mod_base = OTHER; note = N1-methylpseudouracil
  modified_base 2059: mod_base = OTHER; note = N1-methylpseudouracil
  modified_base 2060: mod_base = OTHER; note = N1-methylpseudouracil
  modified_base 2062: mod_base = OTHER; note = N1-methylpseudouracil
  modified_base 2078: mod_base = OTHER; note = N1-methylpseudouracil
  modified_base 2083: mod_base = OTHER; note = N1-methylpseudouracil
  modified_base 2086: mod_base = OTHER; note = N1-methylpseudouracil
  modified_base 2090: mod_base = OTHER; note = N1-methylpseudouracil
  modified_base 2107: mod_base = OTHER; note = N1-methylpseudouracil
  modified_base 2111: mod_base = OTHER; note = N1-methylpseudouracil
  modified_base 2114: mod_base = OTHER; note = N1-methylpseudouracil
  modified_base 2118: mod_base = OTHER; note = N1-methylpseudouracil
  modified_base 2119: mod_base = OTHER; note = N1-methylpseudouracil
  modified_base 2120: mod_base = OTHER; note = N1-methylpseudouracil
  modified_base 2123: mod_base = OTHER; note = N1-methylpseudouracil
  modified_base 2126: mod_base = OTHER; note = N1-methylpseudouracil
  modified_base 2133: mod_base = OTHER; note = N1-methylpseudouracil
  modified_base 2136: mod_base = OTHER; note = N1-methylpseudouracil
  modified_base 2153: mod_base = OTHER; note = N1-methylpseudouracil
  modified_base 2156: mod_base = OTHER; note = N1-methylpseudouracil
  modified_base 2157: mod_base = OTHER; note = N1-methylpseudouracil
  modified_base 2161: mod_base = OTHER; note = N1-methylpseudouracil
  modified_base 2163: mod_base = OTHER; note = N1-methylpseudouracil
  modified_base 2165: mod_base = OTHER; note = N1-methylpseudouracil
  modified_base 2178: mod_base = OTHER; note = N1-methylpseudouracil
  modified_base 2179: mod_base = OTHER; note = N1-methylpseudouracil
  modified_base 2181: mod_base = OTHER; note = N1-methylpseudouracil
  modified_base 2198: mod_base = OTHER; note = N1-methylpseudouracil
  modified_base 2199: mod_base = OTHER; note = N1-methylpseudouracil
  modified_base 2204: mod_base = OTHER; note = N1-methylpseudouracil
  modified_base 2207: mod_base = OTHER; note = N1-methylpseudouracil
  modified_base 2210: mod_base = OTHER; note = N1-methylpseudouracil
  modified_base 2213: mod_base = OTHER; note = N1-methylpseudouracil
  modified_base 2219: mod_base = OTHER; note = N1-methylpseudouracil
  modified_base 2221: mod_base = OTHER; note = N1-methylpseudouracil
  modified_base 2225: mod_base = OTHER; note = N1-methylpseudouracil
  modified_base 2231: mod_base = OTHER; note = N1-methylpseudouracil
  modified_base 2234: mod_base = OTHER; note = N1-methylpseudouracil
  modified_base 2237: mod_base = OTHER; note = N1-methylpseudouracil
  modified_base 2240: mod_base = OTHER; note = N1-methylpseudouracil
  modified_base 2246: mod_base = OTHER; note = N1-methylpseudouracil
  modified_base 2249: mod_base = OTHER; note = N1-methylpseudouracil
  modified_base 2252: mod_base = OTHER; note = N1-methylpseudouracil
  modified_base 2255: mod_base = OTHER; note = N1-methylpseudouracil
  modified_base 2257: mod_base = OTHER; note = N1-methylpseudouracil
  modified_base 2261: mod_base = OTHER; note = N1-methylpseudouracil
  modified_base 2263: mod_base = OTHER; note = N1-methylpseudouracil
  modified_base 2270: mod_base = OTHER; note = N1-methylpseudouracil
  modified_base 2273: mod_base = OTHER; note = N1-methylpseudouracil
  modified_base 2276: mod_base = OTHER; note = N1-methylpseudouracil
  modified_base 2278: mod_base = OTHER; note = N1-methylpseudouracil
  modified_base 2281: mod_base = OTHER; note = N1-methylpseudouracil
  modified_base 2282: mod_base = OTHER; note = N1-methylpseudouracil
  modified_base 2300: mod_base = OTHER; note = N1-methylpseudouracil
  modified_base 2308: mod_base = OTHER; note = N1-methylpseudouracil
  modified_base 2309: mod_base = OTHER; note = N1-methylpseudouracil
  modified_base 2310: mod_base = OTHER; note = N1-methylpseudouracil
  modified_base 2323: mod_base = OTHER; note = N1-methylpseudouracil
  modified_base 2325: mod_base = OTHER; note = N1-methylpseudouracil
  modified_base 2335: mod_base = OTHER; note = N1-methylpseudouracil
  modified_base 2352: mod_base = OTHER; note = N1-methylpseudouracil
  modified_base 2355: mod_base = OTHER; note = N1-methylpseudouracil
  modified_base 2357: mod_base = OTHER; note = N1-methylpseudouracil
  modified_base 2359: mod_base = OTHER; note = N1-methylpseudouracil
  modified_base 2368: mod_base = OTHER; note = N1-methylpseudouracil
  modified_base 2370: mod_base = OTHER; note = N1-methylpseudouracil
  modified_base 2373: mod_base = OTHER; note = N1-methylpseudouracil
  modified_base 2374: mod_base = OTHER; note = N1-methylpseudouracil
  modified_base 2376: mod_base = OTHER; note = N1-methylpseudouracil
  modified_base 2380: mod_base = OTHER; note = N1-methylpseudouracil
  modified_base 2381: mod_base = OTHER; note = N1-methylpseudouracil
  modified_base 2390: mod_base = OTHER; note = N1-methylpseudouracil
  modified_base 2394: mod_base = OTHER; note = N1-methylpseudouracil
  modified_base 2395: mod_base = OTHER; note = N1-methylpseudouracil
  modified_base 2420: mod_base = OTHER; note = N1-methylpseudouracil
  modified_base 2426: mod_base = OTHER; note = N1-methylpseudouracil
  modified_base 2428: mod_base = OTHER; note = N1-methylpseudouracil
  modified_base 2436: mod_base = OTHER; note = N1-methylpseudouracil
  modified_base 2437: mod_base = OTHER; note = N1-methylpseudouracil
  modified_base 2450: mod_base = OTHER; note = N1-methylpseudouracil
  modified_base 2457: mod_base = OTHER; note = N1-methylpseudouracil
  modified_base 2462: mod_base = OTHER; note = N1-methylpseudouracil
  modified_base 2465: mod_base = OTHER; note = N1-methylpseudouracil
  modified_base 2471: mod_base = OTHER; note = N1-methylpseudouracil
  modified_base 2482: mod_base = OTHER; note = N1-methylpseudouracil
  modified_base 2485: mod_base = OTHER; note = N1-methylpseudouracil
  modified_base 2488: mod_base = OTHER; note = N1-methylpseudouracil
  modified_base 2493: mod_base = OTHER; note = N1-methylpseudouracil
  modified_base 2500: mod_base = OTHER; note = N1-methylpseudouracil
  modified_base 2504: mod_base = OTHER; note = N1-methylpseudouracil
  modified_base 2509: mod_base = OTHER; note = N1-methylpseudouracil
  modified_base 2513: mod_base = OTHER; note = N1-methylpseudouracil
  modified_base 2514: mod_base = OTHER; note = N1-methylpseudouracil
  modified_base 2516: mod_base = OTHER; note = N1-methylpseudouracil
  modified_base 2517: mod_base = OTHER; note = N1-methylpseudouracil
  modified_base 2523: mod_base = OTHER; note = N1-methylpseudouracil
  modified_base 2524: mod_base = OTHER; note = N1-methylpseudouracil
  modified_base 2530: mod_base = OTHER; note = N1-methylpseudouracil
  modified_base 2543: mod_base = OTHER; note = N1-methylpseudouracil
  modified_base 2546: mod_base = OTHER; note = N1-methylpseudouracil
  modified_base 2551: mod_base = OTHER; note = N1-methylpseudouracil
  modified_base 2552: mod_base = OTHER; note = N1-methylpseudouracil
  modified_base 2555: mod_base = OTHER; note = N1-methylpseudouracil
  modified_base 2563: mod_base = OTHER; note = N1-methylpseudouracil
  modified_base 2579: mod_base = OTHER; note = N1-methylpseudouracil
  modified_base 2580: mod_base = OTHER; note = N1-methylpseudouracil
  modified_base 2582: mod_base = OTHER; note = N1-methylpseudouracil
  modified_base 2588: mod_base = OTHER; note = N1-methylpseudouracil
  modified_base 2593: mod_base = OTHER; note = N1-methylpseudouracil
  modified_base 2596: mod_base = OTHER; note = N1-methylpseudouracil
  modified_base 2598: mod_base = OTHER; note = N1-methylpseudouracil
  modified_base 2599: mod_base = OTHER; note = N1-methylpseudouracil
  modified_base 2600: mod_base = OTHER; note = N1-methylpseudouracil
  modified_base 2604: mod_base = OTHER; note = N1-methylpseudouracil
  modified_base 2609: mod_base = OTHER; note = N1-methylpseudouracil
  modified_base 2611: mod_base = OTHER; note = N1-methylpseudouracil
  modified_base 2615: mod_base = OTHER; note = N1-methylpseudouracil
ggaaatcgcaaaatttgctcttcgcgttagatttcttttagttttctcgcaactagcaagctttttgttctcgccatgggtatcgagctgctgtgtctgttctttctgtttctgggccgcaacgaccacgtccagggcggctgcgccctgggcggggccgagacctgcgaggactgcctgctcatcgggccacagtgtgcctggtgtgcacaggagaacttcacccaccccagcggggtgggcgagaggtgcgacacccctgcaaatctgctggcaaagggctgccagctgaatttcatcgagaatcccgtcagccaggtggagattctcaagaacaagcctctgagcgtcggacggcagaagaactcttctgacatcgtccagatcgcacctcagagcctgattctgaagctccgcccaggcggagctcagaccctccaggtccacgtcaggcagactgaggactaccccgtggacctgtactacctgatggatctgtccgccagcatggacgacgatctgaacaccattaaggagctgggcagccggctctctaaggagatgtccaagctcaccagcaacttcaggctgggattcggcagctttgtcgagaagcctgtgtctcctttcgtgaagaccacaccagaggagatcgcaaacccctgtagcagcatcccctacttctgcctgcctacattcgggttcaagcacattctgcctctgaccaacgacgcagagcgctttaacgagatcgtgaagaatcagaagatcagcgccaacattgatactcctgagggcggcttcgacgccatcatgcaggctgccgtctgcaaggagaagatcgggtggaggaacgacagcctccacctgctcgtgttcgtgagcgacgccgacagccactttgggatggactccaagctggccggcatcgtgatccccaacgacgggctgtgtcacctcgattccaagaacgagtacagcatgagcaccgtgctggagtaccccaccattgggcagctcattgataagctcgtgcagaacaacgtcctgctgatctttgcagtgacacaggagcaggtgcacctgtacgagaattacgcaaagctcatccccggagccactgtgggcctcctgcagaaggactccgggaacatcctccagctcatcatctccgcctacgaggagctgaggagcgaggtggagctcgaggtcctcggggacaccgagggcctcaacctgagctttaccgccatctgtaacaacggaactctcttccagcaccagaagaagtgctctcacatgaaggtgggcgacaccgcctccttcagcgtgaccgtgaacatccctcactgtgagcggcggagccgccacatcatcatcaagcccgtggggctcggggacgccctggagctcctggtgtcccctgagtgtaactgcgactgccagaaggaggtcgaggtgaacagctctaagtgccaccacggcaacgggagcttccagtgcggggtgtgcgcatgccaccccggccacatggggcctcgctgcgagtgcggcgaggacatgctgtctaccgacagctgcaaggaggcccctgaccaccctagctgctctggccgcggagactgctactgcggccagtgcatctgccacctgtccccttacgggaacatttacgggccctactgccagtgtgataacttttcctgcgtgcggcacaagggcctgctgtgcggaggaaatggcgactgcgactgcggcgagtgcgtctgtcgcagcggctggaccggggagtactgcaactgcactacttccactgacagctgtgtcagcgaggacggggtgctctgttctggccgcggggactgcgtctgcggcaagtgcgtgtgcactaatccaggggcctccgggcccacctgcgagcggtgtcccacctgcggggacccttgcaacagcaagaggtcctgcatcgagtgccacctgtccgccgccggacaggcacgcgaggagtgcgtcgataagtgtaagctcgccggagctacaattagcgaggaggaggacttctccaaggacgggagcgtgagctgctccctccagggagagaacgagtgcctgatcactttcctcatcaccactgataacgagggaaagacaatcattcactctatcaacgagaaggattgtcccaagcccccaaacattcccatgatcatgctgggagtgtccctggcaatcctgctgatcggagtcgtgctgctctgcatctggaagctgctcgtctccttccacgaccgcaaggaggtcgcaaagtttgaggccgagcggtctaaggccaagtggcagacagggaccaatcctctctaccgcgggtctacttctaccttcaagaacgtgacttacaagcacagggagaagcagaaggtggacctctccaccgattgcgggaagcccatccccaatcccctgctgggcctggacagcacctgataataggctggagcctcggtggcctagcttcttgccccttgggcctccccccagcccctcctccccttcctgcacccgtaccccccaaacaccattgtcacactccagtggtctttgaataaagtctgagtgggcggc

SEQ ID NO: 166 - RNA, 2622 nt, unidentified
  source 1..2622: mol_type = unassigned RNA
  modified_base 6: mod_base = OTHER; note = N1-methylpseudouracil
  modified_base 14: mod_base = OTHER; note = N1-methylpseudouracil
  modified_base 15: mod_base = OTHER; note = N1-methylpseudouracil
  modified_base 16: mod_base = OTHER; note = N1-methylpseudouracil
  modified_base 19: mod_base = OTHER; note = N1-methylpseudouracil
  modified_base 21: mod_base = OTHER; note = N1-methylpseudouracil
  modified_base 22: mod_base = OTHER; note = N1-methylpseudouracil
  modified_base 27: mod_base = OTHER; note = N1-methylpseudouracil
  modified_base 28: mod_base = OTHER; note = N1-methylpseudouracil
  modified_base 32: mod_base = OTHER; note = N1-methylpseudouracil
  modified_base 33: mod_base = OTHER; note = N1-methylpseudouracil
  modified_base 34: mod_base = OTHER; note = N1-methylpseudouracil
  modified_base 36: mod_base = OTHER; note = N1-methylpseudouracil
  modified_base 37: mod_base = OTHER; note = N1-methylpseudouracil
  modified_base 38: mod_base = OTHER; note = N1-methylpseudouracil
  modified_base 39: mod_base = OTHER; note = N1-methylpseudouracil
  modified_base 42: mod_base = OTHER; note = N1-methylpseudouracil
  modified_base 43: mod_base = OTHER; note = N1-methylpseudouracil
  modified_base 44: mod_base = OTHER; note = N1-methylpseudouracil
  modified_base 45: mod_base = OTHER; note = N1-methylpseudouracil
  modified_base 47: mod_base = OTHER; note = N1-methylpseudouracil
  modified_base 54: mod_base = OTHER; note = N1-methylpseudouracil
  modified_base 62: mod_base = OTHER; note = N1-methylpseudouracil
  modified_base 63: mod_base = OTHER; note = N1-methylpseudouracil
  modified_base 64: mod_base = OTHER; note = N1-methylpseudouracil
  modified_base 65: mod_base = OTHER; note = N1-methylpseudouracil
  modified_base 66: mod_base = OTHER; note = N1-methylpseudouracil
  modified_base 68: mod_base = OTHER; note = N1-methylpseudouracil
  modified_base 69: mod_base = OTHER; note = N1-methylpseudouracil
  modified_base 71: mod_base = OTHER; note = N1-methylpseudouracil
  modified_base 77: mod_base = OTHER; note = N1-methylpseudouracil
  modified_base 81: mod_base = OTHER; note = N1-methylpseudouracil
  modified_base 83: mod_base = OTHER; note = N1-methylpseudouracil
  modified_base 89: mod_base = OTHER; note = N1-methylpseudouracil
  modified_base 92: mod_base = OTHER; note = N1-methylpseudouracil
  modified_base 94: mod_base = OTHER; note = N1-methylpseudouracil
  modified_base 96: mod_base = OTHER; note = N1-methylpseudouracil
  modified_base 98: mod_base = OTHER; note = N1-methylpseudouracil
  modified_base 100: mod_base = OTHER; note = N1-methylpseudouracil
  modified_base 101: mod_base = OTHER; note = N1-methylpseudouracil
  modified_base 103: mod_base = OTHER; note = N1-methylpseudouracil
  modified_base 104: mod_base = OTHER; note = N1-methylpseudouracil
  modified_base 105: mod_base = OTHER; note = N1-methylpseudouracil
  modified_base 107: mod_base = OTHER; note = N1-methylpseudouracil
  modified_base 109: mod_base = OTHER; note = N1-methylpseudouracil
  modified_base 110: mod_base = OTHER; note = N1-methylpseudouracil
  modified_base 111: mod_base = OTHER; note = N1-methylpseudouracil
  modified_base 113: mod_base = OTHER; note = N1-methylpseudouracil
  modified_base 131: mod_base = OTHER; note = N1-methylpseudouracil
  modified_base 142: mod_base = OTHER; note = N1-methylpseudouracil
  modified_base 149: mod_base = OTHER; note = N1-methylpseudouracil
  modified_base 166: mod_base = OTHER; note = N1-methylpseudouracil
  modified_base 175: mod_base = OTHER; note = N1-methylpseudouracil
  modified_base 179: mod_base = OTHER; note = N1-methylpseudouracil
  modified_base 182: mod_base = OTHER; note = N1-methylpseudouracil
  modified_base 185: mod_base = OTHER; note = N1-methylpseudouracil
  modified_base 196: mod_base = OTHER; note = N1-methylpseudouracil
  modified_base 198: mod_base = OTHER; note = N1-methylpseudouracil
  modified_base 202: mod_base = OTHER; note = N1-methylpseudouracil
  modified_base 205: mod_base = OTHER; note = N1-methylpseudouracil
  modified_base 207: mod_base = OTHER; note = N1-methylpseudouracil
  modified_base 220: mod_base = OTHER; note = N1-methylpseudouracil
  modified_base 221: mod_base = OTHER; note = N1-methylpseudouracil
  modified_base 239: mod_base = OTHER; note = N1-methylpseudouracil
  modified_base 250: mod_base = OTHER; note = N1-methylpseudouracil
  modified_base 261: mod_base = OTHER; note = N1-methylpseudouracil
  modified_base 267: mod_base = OTHER; note = N1-methylpseudouracil
  modified_base 269: mod_base = OTHER; note = N1-methylpseudouracil
  modified_base 272: mod_base = OTHER; note = N1-methylpseudouracil
  modified_base 283: mod_base = OTHER; note = N1-methylpseudouracil
  modified_base 290: mod_base = OTHER; note = N1-methylpseudouracil
  modified_base 294: mod_base = OTHER; note = N1-methylpseudouracil
  modified_base 295: mod_base = OTHER; note = N1-methylpseudouracil
  modified_base 296: mod_base = OTHER; note = N1-methylpseudouracil
  modified_base 299: mod_base = OTHER; note = N1-methylpseudouracil
  modified_base 306: mod_base = OTHER; note = N1-methylpseudouracil
  modified_base 311: mod_base = OTHER; note = N1-methylpseudouracil
  modified_base 320: mod_base = OTHER; note = N1-methylpseudouracil
  modified_base 326: mod_base = OTHER; note = N1-methylpseudouracil
  modified_base 327: mod_base = OTHER; note = N1-methylpseudouracil
  modified_base 329: mod_base = OTHER; note = N1-methylpseudouracil
  modified_base 342: mod_base = OTHER; note = N1-methylpseudouracil
  modified_base 344: mod_base = OTHER; note = N1-methylpseudouracil
  modified_base 350: mod_base = OTHER; note = N1-methylpseudouracil
  modified_base 367: mod_base = OTHER; note = N1-methylpseudouracil
  modified_base 369: mod_base = OTHER; note = N1-methylpseudouracil
  modified_base 370: mod_base = OTHER; note = N1-methylpseudouracil
  modified_base 372: mod_base = OTHER; note = N1-methylpseudouracil
  modified_base 377: mod_base = OTHER; note = N1-methylpseudouracil
  modified_base 380: mod_base = OTHER; note = N1-methylpseudouracil
  modified_base 386: mod_base = OTHER; note = N1-methylpseudouracil
  modified_base 393: mod_base = OTHER; note = N1-methylpseudouracil
  modified_base 401: mod_base = OTHER; note = N1-methylpseudouracil
  modified_base 404: mod_base = OTHER; note = N1-methylpseudouracil
  modified_base 405: mod_base = OTHER; note = N1-methylpseudouracil
  modified_base 407: mod_base = OTHER; note = N1-methylpseudouracil
  modified_base 413: mod_base = OTHER; note = N1-methylpseudouracil
  modified_base 429: mod_base = OTHER; note = N1-methylpseudouracil
  modified_base 437: mod_base = OTHER; note = N1-methylpseudouracil
  modified_base 443: mod_base = OTHER; note = N1-methylpseudouracil
  modified_base 449: mod_base = OTHER; note = N1-methylpseudouracil
  modified_base 459: mod_base = OTHER; note = N1-methylpseudouracil
  modified_base 466: mod_base = OTHER; note = N1-methylpseudouracil
  modified_base 473: mod_base = OTHER; note = N1-methylpseudouracil
  modified_base 479: mod_base = OTHER; note = N1-methylpseudouracil
  modified_base 481: mod_base = OTHER; note = N1-methylpseudouracil
  modified_base 484: mod_base = OTHER; note = N1-methylpseudouracil
  modified_base 488: mod_base = OTHER; note = N1-methylpseudouracil
  modified_base 491: mod_base = OTHER; note = N1-methylpseudouracil
  modified_base 495: mod_base = OTHER; note = N1-methylpseudouracil
  modified_base 497: mod_base = OTHER; note = N1-methylpseudouracil
  modified_base 499: mod_base = OTHER; note = N1-methylpseudouracil
  modified_base 509: mod_base = OTHER; note = N1-methylpseudouracil
  modified_base 519: mod_base = OTHER; note = N1-methylpseudouracil
  modified_base 521: mod_base = OTHER; note = N1-methylpseudouracil
  modified_base 530: mod_base = OTHER; note = N1-methylpseudouracil
  modified_base 531: mod_base = OTHER; note = N1-methylpseudouracil
  modified_base 539: mod_base = OTHER; note = N1-methylpseudouracil
  modified_base 551: mod_base = OTHER; note = N1-methylpseudouracil
  modified_base 553: mod_base = OTHER; note = N1-methylpseudouracil
  modified_base 555: mod_base = OTHER; note = N1-methylpseudouracil
  modified_base 563: mod_base = OTHER; note = N1-methylpseudouracil
  modified_base 565: mod_base = OTHER; note = N1-methylpseudouracil
  modified_base 572: mod_base = OTHER; note = N1-methylpseudouracil
  modified_base 583: mod_base = OTHER; note = N1-methylpseudouracil
  modified_base 584: mod_base = OTHER; note = N1-methylpseudouracil
  modified_base 590: mod_base = OTHER; note = N1-methylpseudouracil
  modified_base 595: mod_base = OTHER; note = N1-methylpseudouracil
  modified_base 596: mod_base = OTHER; note = N1-methylpseudouracil
  modified_base 604: mod_base = OTHER; note = N1-methylpseudouracil
  modified_base 605: mod_base = OTHER; note = N1-methylpseudouracil
  modified_base 606: mod_base = OTHER; note = N1-methylpseudouracil
  modified_base 608: mod_base = OTHER; note = N1-methylpseudouracil
  modified_base 618: mod_base = OTHER; note = N1-methylpseudouracil
  modified_base 620: mod_base = OTHER; note = N1-methylpseudouracil
  modified_base 622: mod_base = OTHER; note = N1-methylpseudouracil
  modified_base 624: mod_base = OTHER; note = N1-methylpseudouracil
  modified_base 627: mod_base = OTHER; note = N1-methylpseudouracil
  modified_base 628: mod_base = OTHER; note = N1-methylpseudouracil
  modified_base 629: mod_base = OTHER; note = N1-methylpseudouracil
  modified_base 632: mod_base = OTHER; note = N1-methylpseudouracil
  modified_base 653: mod_base = OTHER; note = N1-methylpseudouracil
  modified_base 664: mod_base = OTHER; note = N1-methylpseudouracil
  modified_base 666: mod_base = OTHER; note = N1-methylpseudouracil
  modified_base 674: mod_base = OTHER; note = N1-methylpseudouracil
  modified_base 679: mod_base = OTHER; note = N1-methylpseudouracil
  modified_base 682: mod_base = OTHER; note = N1-methylpseudouracil
  modified_base 683: mod_base = OTHER; note = N1-methylpseudouracil
  modified_base 685: mod_base = OTHER; note = N1-methylpseudouracil
  modified_base 689: mod_base = OTHER; note = N1-methylpseudouracil
  modified_base 693: mod_base = OTHER; note = N1-methylpseudouracil
  modified_base 697: mod_base = OTHER; note = N1-methylpseudouracil
  modified_base 698: mod_base = OTHER; note = N1-methylpseudouracil
  modified_base 703: mod_base = OTHER; note = N1-methylpseudouracil
  modified_base 704: mod_base = OTHER; note = N1-methylpseudouracil
  modified_base 713: mod_base = OTHER; note = N1-methylpseudouracil
  modified_base 714: mod_base = OTHER; note = N1-methylpseudouracil
  modified_base 716: mod_base = OTHER; note = N1-methylpseudouracil
  modified_base 720: mod_base = OTHER; note = N1-methylpseudouracil
  modified_base 722: mod_base = OTHER; note = N1-methylpseudouracil
  modified_base 742: mod_base = OTHER; note = N1-methylpseudouracil
  modified_base 743: mod_base = OTHER; note = N1-methylpseudouracil
  modified_base 744: mod_base = OTHER; note = N1-methylpseudouracil
  modified_base 752: mod_base = OTHER; note = N1-methylpseudouracil
  modified_base 755: mod_base = OTHER; note = N1-methylpseudouracil
  modified_base 762: mod_base = OTHER; note = N1-methylpseudouracil
  modified_base 770: mod_base = OTHER; note = N1-methylpseudouracil
  modified_base 782: mod_base = OTHER; note = N1-methylpseudouracil
  modified_base 783: mod_base = OTHER; note = N1-methylpseudouracil
  modified_base 786: mod_base = OTHER; note = N1-methylpseudouracil
  modified_base 789: mod_base = OTHER; note = N1-methylpseudouracil
  modified_base 792: mod_base = OTHER; note = N1-methylpseudouracil
  modified_base 802: mod_base = OTHER; note = N1-methylpseudouracil
  modified_base 803: mod_base = OTHER; note = N1-methylpseudouracil
  modified_base 812: mod_base = OTHER; note = N1-methylpseudouracil
  modified_base 815: mod_base = OTHER; note = N1-methylpseudouracil
  modified_base 822: mod_base = OTHER; note = N1-methylpseudouracil
  modified_base 827: mod_base = OTHER; note = N1-methylpseudouracil
  modified_base 829: mod_base = OTHER; note = N1-methylpseudouracil
  modified_base 842: mod_base = OTHER; note = N1-methylpseudouracil
  modified_base 847: mod_base = OTHER; note = N1-methylpseudouracil
  modified_base 863: mod_base = OTHER; note = N1-methylpseudouracil
  modified_base 869: mod_base = OTHER; note = N1-methylpseudouracil
  modified_base 872: mod_base = OTHER; note = N1-methylpseudouracil
  modified_base 875: mod_base = OTHER; note = N1-methylpseudouracil
  modified_base 877: mod_base = OTHER; note = N1-methylpseudouracil
  modified_base 878: mod_base = OTHER; note = N1-methylpseudouracil
  modified_base 881: mod_base = OTHER; note = N1-methylpseudouracil
  modified_base 901: mod_base = OTHER; note = N1-methylpseudouracil
  modified_base 902: mod_base = OTHER; note = N1-methylpseudouracil
  modified_base 903: mod_base = OTHER; note = N1-methylpseudouracil
  modified_base 908: mod_base = OTHER; note = N1-methylpseudouracil
  modified_base 913: mod_base = OTHER; note = N1-methylpseudouracil
  modified_base 920: mod_base = OTHER; note = N1-methylpseudouracil
  modified_base 929: mod_base = OTHER; note = N1-methylpseudouracil
  modified_base 932: mod_base = OTHER; note = N1-methylpseudouracil
  modified_base 935: mod_base = OTHER; note = N1-methylpseudouracil
  modified_base 950: mod_base = OTHER; note = N1-methylpseudouracil
  modified_base 952: mod_base = OTHER; note = N1-methylpseudouracil
  modified_base 954: mod_base = OTHER; note = N1-methylpseudouracil
  modified_base 959: mod_base = OTHER; note = N1-methylpseudouracil
  modified_base 963: mod_base = OTHER; note = N1-methylpseudouracil
  modified_base 964: mod_base = OTHER; note = N1-methylpseudouracil
  modified_base 976: mod_base = OTHER; note = N1-methylpseudouracil
  modified_base 983: mod_base = OTHER; note = N1-methylpseudouracil
  modified_base 992: mod_base = OTHER; note = N1-methylpseudouracil
  modified_base 995: mod_base = OTHER; note = N1-methylpseudouracil
  modified_base 1000: mod_base = OTHER; note = N1-methylpseudouracil
  modified_base 1010: mod_base = OTHER; note = N1-methylpseudouracil
  modified_base 1011: mod_base = OTHER; note = N1-methylpseudouracil
  modified_base 1019: mod_base = OTHER; note = N1-methylpseudouracil
  modified_base 1022: mod_base = OTHER; note = N1-methylpseudouracil
  modified_base 1023: mod_base = OTHER; note = N1-methylpseudouracil
  modified_base 1026: mod_base = OTHER; note = N1-methylpseudouracil
  modified_base 1031: mod_base = OTHER; note = N1-methylpseudouracil
  modified_base 1034: mod_base = OTHER; note = N1-methylpseudouracil
  modified_base 1046: mod_base = OTHER; note = N1-methylpseudouracil
  modified_base 1049: mod_base = OTHER; note = N1-methylpseudouracil
  modified_base 1052: mod_base = OTHER; note = N1-methylpseudouracil
  modified_base 1055: mod_base = OTHER; note = N1-methylpseudouracil
  modified_base 1057: mod_base = OTHER; note = N1-methylpseudouracil
  modified_base 1058: mod_base = OTHER; note = N1-methylpseudouracil
  modified_base 1059: mod_base = OTHER; note = N1-methylpseudouracil
  modified_base 1064: mod_base = OTHER; note = N1-methylpseudouracil
  modified_base 1079: mod_base = OTHER; note = N1-methylpseudouracil
  modified_base 1085: mod_base = OTHER; note = N1-methylpseudouracil
  modified_base 1087: mod_base = OTHER; note = N1-methylpseudouracil
  modified_base 1095: mod_base = OTHER; note = N1-methylpseudouracil
  modified_base 1096: mod_base = OTHER; note = N1-methylpseudouracil
  modified_base 1106: mod_base = OTHER; note = N1-methylpseudouracil
  modified_base 1109: mod_base = OTHER; note = N1-methylpseudouracil
  modified_base 1122: mod_base = OTHER; note = N1-methylpseudouracil
  modified_base 1124: mod_base = OTHER; note = N1-methylpseudouracil
  modified_base 1130: mod_base = OTHER; note = N1-methylpseudouracil
  modified_base 1133: mod_base = OTHER; note = N1-methylpseudouracil
  modified_base 1144: mod_base = OTHER; note = N1-methylpseudouracil
  modified_base 1154: mod_base = OTHER; note = N1-methylpseudouracil
  modified_base 1157: mod_base = OTHER; note = N1-methylpseudouracil
  modified_base 1163: mod_base = OTHER; note = N1-methylpseudouracil
  modified_base 1166: mod_base = OTHER; note = N1-methylpseudouracil
  modified_base 1169: mod_base = OTHER; note = N1-methylpseudouracil
  modified_base 1171: mod_base = OTHER; note = N1-methylpseudouracil
  modified_base 1177: mod_base = OTHER; note = N1-methylpseudouracil
  modified_base 1187: mod_base = OTHER; note = N1-methylpseudouracil
  modified_base 1199: mod_base = OTHER; note = N1-methylpseudouracil
  modified_base 1205: mod_base = OTHER; note = N1-methylpseudouracil
  modified_base 1211: mod_base = OTHER; note = N1-methylpseudouracil
  modified_base 1214: mod_base = OTHER; note = N1-methylpseudouracil
  modified_base 1232: mod_base = OTHER; note = N1-methylpseudouracil
  modified_base 1238: mod_base = OTHER; note = N1-methylpseudouracil
  modified_base 1243: mod_base = OTHER; note = N1-methylpseudouracil
  modified_base 1244: mod_base = OTHER; note = N1-methylpseudouracil
  modified_base 1245: mod_base = OTHER; note = N1-methylpseudouracil
  modified_base 1253: mod_base = OTHER; note = N1-methylpseudouracil
  modified_base 1255: mod_base = OTHER; note = N1-methylpseudouracil
  modified_base 1257: mod_base = OTHER; note = N1-methylpseudouracil
  modified_base 1269: mod_base = OTHER; note = N1-methylpseudouracil
  modified_base 1271: mod_base = OTHER; note = N1-methylpseudouracil
  modified_base 1273: mod_base = OTHER; note = N1-methylpseudouracil
  modified_base 1274: mod_base = OTHER; note = N1-methylpseudouracil
  modified_base 1291: mod_base = OTHER; note = N1-methylpseudouracil
  modified_base 1294: mod_base = OTHER; note = N1-methylpseudouracil
  modified_base 1296: mod_base = OTHER; note = N1-methylpseudouracil
  modified_base 1301: mod_base = OTHER; note = N1-methylpseudouracil
  modified_base 1307: mod_base = OTHER; note = N1-methylpseudouracil
  modified_base 1321: mod_base = OTHER; note = N1-methylpseudouracil
  modified_base 1324: mod_base = OTHER; note = N1-methylpseudouracil
  modified_base 1325: mod_base = OTHER; note = N1-methylpseudouracil
  modified_base 1331: mod_base = OTHER; note = N1-methylpseudouracil
  modified_base 1337: mod_base = OTHER; note = N1-methylpseudouracil
  modified_base 1343: mod_base = OTHER; note = N1-methylpseudouracil
  modified_base 1347: mod_base = OTHER; note = N1-methylpseudouracil
  modified_base 1351: mod_base = OTHER; note = N1-methylpseudouracil
  modified_base 1353: mod_base = OTHER; note = N1-methylpseudouracil
  modified_base 1373: mod_base = OTHER; note = N1-methylpseudouracil
  modified_base 1376: mod_base = OTHER; note = N1-methylpseudouracil
  modified_base 1379: mod_base = OTHER; note = N1-methylpseudouracil
  modified_base 1388: mod_base = OTHER; note = N1-methylpseudouracil
  modified_base 1394: mod_base = OTHER; note = N1-methylpseudouracil
  modified_base 1406: mod_base = OTHER; note = N1-methylpseudouracil
  modified_base 1412: mod_base = OTHER; note = N1-methylpseudouracil
  modified_base 1415: mod_base = OTHER; note = N1-methylpseudouracil
  modified_base 1418: mod_base = OTHER; note = N1-methylpseudouracil
  modified_base 1420: mod_base = OTHER; note = N1-methylpseudouracil
  modified_base 1425: mod_base = OTHER; note = N1-methylpseudouracil
  modified_base 1429: mod_base = OTHER; note = N1-methylpseudouracil
  modified_base 1431: mod_base = OTHER; note = N1-methylpseudouracil
  modified_base 1435: mod_base = OTHER; note = N1-methylpseudouracil
  modified_base 1441: mod_base = OTHER; note = N1-methylpseudouracil
  modified_base 1454: mod_base = OTHER; note = N1-methylpseudouracil
  modified_base 1460: mod_base = OTHER; note = N1-methylpseudouracil
  modified_base 1468: mod_base = OTHER; note = N1-methylpseudouracil
  modified_base 1470: mod_base = OTHER; note = N1-methylpseudouracil
  modified_base 1474: mod_base = OTHER; note = N1-methylpseudouracil
  modified_base 1495: mod_base = OTHER; note = N1-methylpseudouracil
  modified_base 1496: mod_base = OTHER; note = N1-methylpseudouracil
  modified_base 1501: mod_base = OTHER; note = N1-methylpseudouracil
  modified_base 1508: mod_base = OTHER; note = N1-methylpseudouracil
  modified_base 1510: mod_base = OTHER; note = N1-methylpseudouracil
  modified_base 1516: mod_base = OTHER; note = N1-methylpseudouracil
  modified_base 1532: mod_base = OTHER; note = N1-methylpseudouracil
  modified_base 1539: mod_base = OTHER; note = N1-methylpseudouracil
  modified_base 1543: mod_base = OTHER; note = N1-methylpseudouracil
  modified_base 1549: mod_base = OTHER; note = N1-methylpseudouracil
  modified_base 1562: mod_base = OTHER; note = N1-methylpseudouracil
  modified_base 1565: mod_base = OTHER; note = N1-methylpseudouracil
  modified_base 1567: mod_base = OTHER; note = N1-methylpseudouracil
  modified_base 1569: mod_base = OTHER; note = N1-methylpseudouracil
  modified_base 1579: mod_base = OTHER; note = N1-methylpseudouracil
  modified_base 1593: mod_base = OTHER; note = N1-methylpseudouracil
  modified_base 1602: mod_base = OTHER; note = N1-methylpseudouracil
  modified_base 1606: mod_base = OTHER; note = N1-methylpseudouracil
  modified_base 1609: mod_base = OTHER; note = N1-methylpseudouracil
  modified_base 1611: mod_base = OTHER; note = N1-methylpseudouracil
  modified_base 1624: mod_base = OTHER; note = N1-methylpseudouracil
  modified_base 1627: mod_base = OTHER; note = N1-methylpseudouracil
  modified_base 1630: mod_base = OTHER; note = N1-methylpseudouracil
  modified_base 1639: mod_base = OTHER; note = N1-methylpseudouracil
  modified_base 1643: mod_base = OTHER; note = N1-methylpseudouracil
  modified_base 1645: mod_base = OTHER; note = N1-methylpseudouracil
  modified_base 1652: mod_base = OTHER; note = N1-methylpseudouracil
  modified_base 1654: mod_base = OTHER; note = N1-methylpseudouracil
  modified_base 1659: mod_base = OTHER; note = N1-methylpseudouracil
  modified_base 1660: mod_base = OTHER; note = N1-methylpseudouracil
  modified_base 1670: mod_base = OTHER; note = N1-methylpseudouracil
  modified_base 1671: mod_base = OTHER; note = N1-methylpseudouracil
  modified_base 1672: mod_base = OTHER; note = N1-methylpseudouracil
  modified_base 1681: mod_base = OTHER; note = N1-methylpseudouracil
  modified_base 1684: mod_base = OTHER; note = N1-methylpseudouracil
  modified_base 1690: mod_base = OTHER; note = N1-methylpseudouracil
  modified_base 1692: mod_base = OTHER; note = N1-methylpseudouracil
  modified_base 1695: mod_base = OTHER; note = N1-methylpseudouracil
  modified_base 1699: mod_base = OTHER; note = N1-methylpseudouracil
  modified_base 1700: mod_base = OTHER; note = N1-methylpseudouracil
  modified_base 1701: mod_base = OTHER; note = N1-methylpseudouracil
  modified_base 1702: mod_base = OTHER; note = N1-methylpseudouracil
  modified_base 1705: mod_base = OTHER; note = N1-methylpseudouracil
  modified_base 1709: mod_base = OTHER; note = N1-methylpseudouracil
  modified_base 1724: mod_base = OTHER; note = N1-methylpseudouracil
  modified_base 1727: mod_base = OTHER; note = N1-methylpseudouracil
  modified_base 1729: mod_base = OTHER; note = N1-methylpseudouracil
  modified_base 1740: mod_base = OTHER; note = N1-methylpseudouracil
  modified_base 1747: mod_base = OTHER; note = N1-methylpseudouracil
  modified_base 1753: mod_base = OTHER; note = N1-methylpseudouracil
  modified_base 1762: mod_base = OTHER; note = N1-methylpseudouracil
  modified_base 1766: mod_base = OTHER; note = N1-methylpseudouracil
  modified_base 1768: mod_base = OTHER; note = N1-methylpseudouracil
  modified_base 1770: mod_base = OTHER; note = N1-methylpseudouracil
  modified_base 1780: mod_base = OTHER; note = N1-methylpseudouracil
  modified_base 1792: mod_base = OTHER; note = N1-methylpseudouracil
  modified_base 1795: mod_base = OTHER; note = N1-methylpseudouracil
  modified_base 1801: mod_base = OTHER; note = N1-methylpseudouracil
  modified_base 1806: mod_base = OTHER; note = N1-methylpseudouracil
  modified_base 1809: mod_base = OTHER; note = N1-methylpseudouracil
  modified_base 1810: mod_base = OTHER; note = N1-methylpseudouracil
  modified_base 1815: mod_base = OTHER; note = N1-methylpseudouracil
  modified_base 1822: mod_base = OTHER; note = N1-methylpseudouracil
  modified_base 1824: mod_base = OTHER; note = N1-methylpseudouracil
  modified_base 1826: mod_base = OTHER; note = N1-methylpseudouracil
  modified_base 1841: mod_base = OTHER; note = N1-methylpseudouracil
  modified_base 1844: mod_base = OTHER; note = N1-methylpseudouracil
  modified_base 1846: mod_base = OTHER; note = N1-methylpseudouracil
  modified_base 1848: mod_base = OTHER; note = N1-methylpseudouracil
  modified_base 1849: mod_base = OTHER; note = N1-methylpseudouracil
  modified_base 1851: mod_base = OTHER; note = N1-methylpseudouracil
  modified_base 1864: mod_base = OTHER; note = N1-methylpseudouracil
  modified_base 1868: mod_base = OTHER; note = N1-methylpseudouracil
  modified_base 1870: mod_base = OTHER; note = N1-methylpseudouracil
  modified_base 1879: mod_base = OTHER; note = N1-methylpseudouracil
  modified_base 1883: mod_base = OTHER; note = N1-methylpseudouracil
  modified_base 1885: mod_base = OTHER; note = N1-methylpseudouracil
  modified_base 1890: mod_base = OTHER; note = N1-methylpseudouracil
  modified_base 1893: mod_base = OTHER; note = N1-methylpseudouracil
  modified_base 1903: mod_base = OTHER; note = N1-methylpseudouracil
  modified_base 1915: mod_base = OTHER; note = N1-methylpseudouracil
  modified_base 1924: mod_base = OTHER; note = N1-methylpseudouracil
  modified_base 1926: mod_base = OTHER; note = N1-methylpseudouracil
  modified_base 1933: mod_base = OTHER; note = N1-methylpseudouracil
  modified_base 1944: mod_base = OTHER; note = N1-methylpseudouracil
  modified_base 1945: mod_base = OTHER; note = N1-methylpseudouracil
  modified_base 1960: mod_base = OTHER; note = N1-methylpseudouracil
  modified_base 1963: mod_base = OTHER; note = N1-methylpseudouracil
  modified_base 1967: mod_base = OTHER; note = N1-methylpseudouracil
  modified_base 1972: mod_base = OTHER; note = N1-methylpseudouracil
  modified_base 1979: mod_base = OTHER; note = N1-methylpseudouracil
  modified_base 1981: mod_base = OTHER; note = N1-methylpseudouracil
  modified_base 2008: mod_base = OTHER; note = N1-methylpseudouracil
  modified_base 2012: mod_base = OTHER; note = N1-methylpseudouracil
  modified_base 2016: mod_base = OTHER; note = N1-methylpseudouracil
  modified_base 2020: mod_base = OTHER; note = N1-methylpseudouracil
  modified_base 2022: mod_base = OTHER; note = N1-methylpseudouracil
  modified_base 2027: mod_base = OTHER; note = N1-methylpseudouracil
  modified_base 2037: mod_base = OTHER; note = N1-methylpseudouracil
  modified_base 2042: mod_base = OTHER; note = N1-methylpseudouracil
  modified_base 2043: mod_base = OTHER; note = N1-methylpseudouracil
  modified_base 2059: mod_base = OTHER; note = N1-methylpseudouracil
  modified_base 2060: mod_base = OTHER; note = N1-methylpseudouracil
  modified_base 2062: mod_base = OTHER; note = N1-methylpseudouracil
  modified_base 2078: mod_base = OTHER; note = N1-methylpseudouracil
  modified_base 2083: mod_base = OTHER; note = N1-methylpseudouracil
  modified_base 2086: mod_base = OTHER; note = N1-methylpseudouracil
  modified_base 2090: mod_base = OTHER; note = N1-methylpseudouracil
  modified_base 2107: mod_base = OTHER; note = N1-methylpseudouracil
  modified_base 2111: mod_base = OTHER; note = N1-methylpseudouracil
  modified_base 2114: mod_base = OTHER; note = N1-methylpseudouracil
  modified_base 2118: mod_base = OTHER; note = N1-methylpseudouracil
  modified_base 2119: mod_base = OTHER; note = N1-methylpseudouracil
  modified_base 2120: mod_base = OTHER; note = N1-methylpseudouracil
  modified_base 2123: mod_base = OTHER; note = N1-methylpseudouracil
  modified_base 2126: mod_base = OTHER; note = N1-methylpseudouracil
  modified_base 2133: mod_base = OTHER; note = N1-methylpseudouracil
  modified_base 2136: mod_base = OTHER; note = N1-methylpseudouracil
  modified_base 2153: mod_base = OTHER; note = N1-methylpseudouracil
  modified_base 2156: mod_base = OTHER; note = N1-methylpseudouracil
  modified_base 2157: mod_base = OTHER; note = N1-methylpseudouracil
  modified_base 2161: mod_base = OTHER; note = N1-methylpseudouracil
  modified_base 2163: mod_base = OTHER; note = N1-methylpseudouracil
  modified_base 2165: mod_base = OTHER; note = N1-methylpseudouracil
  modified_base 2178: mod_base = OTHER; note = N1-methylpseudouracil
  modified_base 2179: mod_base = OTHER; note = N1-methylpseudouracil
  modified_base 2181: mod_base = OTHER; note = N1-methylpseudouracil
  modified_base 2198: mod_base = OTHER; note = N1-methylpseudouracil
  modified_base 2199: mod_base = OTHER; note = N1-methylpseudouracil
  modified_base 2204: mod_base = OTHER; note = N1-methylpseudouracil
  modified_base 2207: mod_base = OTHER; note = N1-methylpseudouracil
  modified_base 2210: mod_base = OTHER; note = N1-methylpseudouracil
  modified_base 2213: mod_base = OTHER; note = N1-methylpseudouracil
  modified_base 2219: mod_base = OTHER; note = N1-methylpseudouracil
  modified_base 2221: mod_base = OTHER; note = N1-methylpseudouracil
  modified_base 2225: mod_base = OTHER; note = N1-methylpseudouracil
  modified_base 2231: mod_base = OTHER; note = N1-methylpseudouracil
  modified_base 2234: mod_base = OTHER; note = N1-methylpseudouracil
  modified_base 2237: mod_base = OTHER; note = N1-methylpseudouracil
  modified_base 2240: mod_base = OTHER; note = N1-methylpseudouracil
  modified_base 2246: mod_base = OTHER; note = N1-methylpseudouracil
  modified_base 2249: mod_base = OTHER; note = N1-methylpseudouracil
  modified_base 2252: mod_base = OTHER; note = N1-methylpseudouracil
  modified_base 2255: mod_base = OTHER; note = N1-methylpseudouracil
  modified_base 2257: mod_base = OTHER; note = N1-methylpseudouracil
  modified_base 2261: mod_base = OTHER; note = N1-methylpseudouracil
  modified_base 2263: mod_base = OTHER; note = N1-methylpseudouracil
  modified_base 2270: mod_base = OTHER; note = N1-methylpseudouracil
  modified_base 2273: mod_base = OTHER; note = N1-methylpseudouracil
  modified_base 2276: mod_base = OTHER; note = N1-methylpseudouracil
  modified_base 2278: mod_base = OTHER; note = N1-methylpseudouracil
  modified_base 2281: mod_base = OTHER; note = N1-methylpseudouracil
  modified_base 2282: mod_base = OTHER; note = N1-methylpseudouracil
  modified_base 2300: mod_base = OTHER; note = N1-methylpseudouracil
  modified_base 2308: mod_base = OTHER; note = N1-methylpseudouracil
  modified_base 2309: mod_base = OTHER; note = N1-methylpseudouracil
  modified_base 2310: mod_base = OTHER; note = N1-methylpseudouracil
  modified_base 2323: mod_base = OTHER; note = N1-methylpseudouracil
  modified_base 2325: mod_base = OTHER; note = N1-methylpseudouracil
  modified_base 2335: mod_base = OTHER; note = N1-methylpseudouracil
  modified_base 2352: mod_base = OTHER; note = N1-methylpseudouracil
  modified_base 2355: mod_base = OTHER; note = N1-methylpseudouracil
  modified_base 2357: mod_base = OTHER; note = N1-methylpseudouracil
  modified_base 2359: mod_base = OTHER; note = N1-methylpseudouracil
  modified_base 2368: mod_base = OTHER; note = N1-methylpseudouracil
  modified_base 2370: mod_base = OTHER; note = N1-methylpseudouracil
  modified_base 2373: mod_base = OTHER; note = N1-methylpseudouracil
  modified_base 2374: mod_base = OTHER; note = N1-methylpseudouracil
  modified_base 2376: mod_base = OTHER; note = N1-methylpseudouracil
  modified_base 2380: mod_base = OTHER; note = N1-methylpseudouracil
  modified_base 2381: mod_base = OTHER; note = N1-methylpseudouracil
  modified_base 2390: mod_base = OTHER; note = N1-methylpseudouracil
  modified_base 2394: mod_base = OTHER; note = N1-methylpseudouracil
  modified_base 2395: mod_base = OTHER; note = N1-methylpseudouracil
  modified_base 2420: mod_base = OTHER; note = N1-methylpseudouracil
  modified_base 2426: mod_base = OTHER; note = N1-methylpseudouracil
  modified_base 2428: mod_base = OTHER; note = N1-methylpseudouracil
  modified_base 2436: mod_base = OTHER; note = N1-methylpseudouracil
  modified_base 2437: mod_base = OTHER; note = N1-methylpseudouracil
  modified_base 2450: mod_base = OTHER; note = N1-methylpseudouracil
  modified_base 2457: mod_base = OTHER; note = N1-methylpseudouracil
  modified_base 2462: mod_base = OTHER; note = N1-methylpseudouracil
  modified_base 2465: mod_base = OTHER; note = N1-methylpseudouracil
  modified_base 2471: mod_base = OTHER; note = N1-methylpseudouracil
  modified_base 2482: mod_base = OTHER; note = N1-methylpseudouracil
  modified_base 2490: mod_base = OTHER; note = N1-methylpseudouracil
  modified_base 2500: mod_base = OTHER; note = N1-methylpseudouracil
  modified_base 2504: mod_base = OTHER; note = N1-methylpseudouracil
  modified_base 2509: mod_base = OTHER; note = N1-methylpseudouracil
  modified_base 2513: mod_base = OTHER; note = N1-methylpseudouracil
  modified_base 2514: mod_base = OTHER; note = N1-methylpseudouracil
  modified_base 2516: mod_base = OTHER; note = N1-methylpseudouracil
  modified_base 2517: mod_base = OTHER; note = N1-methylpseudouracil
  modified_base 2523: mod_base = OTHER; note = N1-methylpseudouracil
  modified_base 2524: mod_base = OTHER; note = N1-methylpseudouracil
  modified_base 2530: mod_base = OTHER; note = N1-methylpseudouracil
  modified_base 2543: mod_base = OTHER; note = N1-methylpseudouracil
  modified_base 2546: mod_base = OTHER; note = N1-methylpseudouracil
  modified_base 2551: mod_base = OTHER; note = N1-methylpseudouracil
  modified_base 2552: mod_base = OTHER; note = N1-methylpseudouracil
  modified_base 2555: mod_base = OTHER; note = N1-methylpseudouracil
  modified_base 2563: mod_base = OTHER; note = N1-methylpseudouracil
  modified_base 2579: mod_base = OTHER; note = N1-methylpseudouracil
  modified_base 2580: mod_base = OTHER; note = N1-methylpseudouracil
  modified_base 2582: mod_base = OTHER; note = N1-methylpseudouracil
  modified_base 2588: mod_base = OTHER; note = N1-methylpseudouracil
  modified_base 2593: mod_base = OTHER; note = N1-methylpseudouracil
  modified_base 2596: mod_base = OTHER; note = N1-methylpseudouracil
  modified_base 2598: mod_base = OTHER; note = N1-methylpseudouracil
  modified_base 2599: mod_base = OTHER; note = N1-methylpseudouracil
  modified_base 2600: mod_base = OTHER; note = N1-methylpseudouracil
  modified_base 2604: mod_base = OTHER; note = N1-methylpseudouracil
  modified_base 2609: mod_base = OTHER; note = N1-methylpseudouracil
  modified_base 2611: mod_base = OTHER; note = N1-methylpseudouracil
  modified_base 2615: mod_base = OTHER; note = N1-methylpseudouracil
ggaaatcgcaaaatttgctcttcgcgttagatttcttttagttttctcgcaactagcaagctttttgttctcgccatgggtatcgagctgctgtgtctgttctttctgtttctgggccgcaacgaccacgtccagggcggctgcgccctgggcggggccgagacctgcgaggactgcctgctcatcgggccacagtgtgcctggtgtgcacaggagaacttcacccaccccagcggggtgggcgagaggtgcgacacccctgcaaatctgctggcaaagggctgccagctgaatttcatcgagaatcccgtcagccaggtggagattctcaagaacaagcctctgagcgtcggacggcagaagaactcttctgacatcgtccagatcgcacctcagagcctgattctgaagctccgcccaggcggagctcagaccctccaggtccacgtcaggcagactgaggactaccccgtggacctgtactacctgatggatctgtccgccagcatggacgacgatctgaacaccattaaggagctgggcagccggctctctaaggagatgtccaagctcaccagcaacttcaggctgggattcggcagctttgtcgagaagcctgtgtctcctttcgtgaagaccacaccagaggagatcgcaaacccctgtagcagcatcccctacttctgcctgcctacattcgggttcaagcacattctgcctctgaccaacgacgcagagcgctttaacgagatcgtgaagaatcagaagatcagcgccaacattgatactcctgagggcggcttcgacgccatcatgcaggctgccgtctgcaaggagaagatcgggtggaggaacgacagcctccacctgctcgtgttcgtgagcgacgccgacagccactttgggatggactccaagctggccggcatcgtgatccccaacgacgggctgtgtcacctcgattccaagaacgagtacagcatgagcaccgtgctggagtaccccaccattgggcagctcattgataagctcgtgcagaacaacgtcctgctgatctttgcagtgacacaggagcaggtgcacctgtacgagaattacgcaaagctcatccccggagccactgtgggcctcctgcagaaggactccgggaacatcctccagctcatcatctccgcctacgaggagctgaggagcgaggtggagctcgaggtcctcggggacaccgagggcctcaacctgagctttaccgccatctgtaacaacggaactctcttccagcaccagaagaagtgctctcacatgaaggtgggcgacaccgcctccttcagcgtgaccgtgaacatccctcactgtgagcggcggagccgccacatcatcatcaagcccgtggggctcggggacgccctggagctcctggtgtcccctgagtgtaactgcgactgccagaaggaggtcgaggtgaacagctctaagtgccaccacggcaacgggagcttccagtgcggggtgtgcgcatgccaccccggccacatggggcctcgctgcgagtgcggcgaggacatgctgtctaccgacagctgcaaggaggcccctgaccaccctagctgctctggccgcggagactgctactgcggccagtgcatctgccacctgtccccttacgggaacatttacgggccctactgccagtgtgataacttttcctgcgtgcggcacaagggcctgctgtgcggaggaaatggcgactgcgactgcggcgagtgcgtctgtcgcagcggctggaccggggagtactgcaactgcactacttccactgacagctgtgtcagcgaggacggggtgctctgttctggccgcggggactgcgtctgcggcaagtgcgtgtgcactaatccaggggcctccgggcccacctgcgagcggtgtcccacctgcggggacccttgcaacagcaagaggtcctgcatcgagtgccacctgtccgccgccggacaggcacgcgaggagtgcgtcgataagtgtaagctcgccggagctacaattagcgaggaggaggacttctccaaggacgggagcgtgagctgctccctccagggagagaacgagtgcctgatcactttcctcatcaccactgataacgagggaaagacaatcattcactctatcaacgagaaggattgtcccaagcccccaaacattcccatgatcatgctgggagtgtccctggcaatcctgctgatcggagtcgtgctgctctgcatctggaagctgctcgtctccttccacgaccgcaaggaggtcgcaaagtttgaggccgagcggtctaaggccaagtggcagacagggaccaatcctctctaccgcgggtctacttctaccttcaagaacgtgacttacaagcacagggagaagcagaaggtggacctctccaccgattgcgggaagcccatccccaatcccctgctgggcctggacagcacctaagcccctccgggggcctcggtggcctagcttcttgccccttgggcctccccccagcccctcctccccttcctgcacccgtaccccccaaacaccattgtcacactccagtggtctttgaataaagtctgagtgggcggc

SEQ ID NO: 167 - RNA, 2622 nt, unidentified
  source 1..2622: mol_type = unassigned RNA
  modified_base 6: mod_base = OTHER; note = N1-methylpseudouracil
  modified_base 14: mod_base = OTHER; note = N1-methylpseudouracil
  modified_base 15: mod_base = OTHER; note = N1-methylpseudouracil
  modified_base 16: mod_base = OTHER; note = N1-methylpseudouracil
  modified_base 19: mod_base = OTHER; note = N1-methylpseudouracil
  modified_base 21: mod_base = OTHER; note = N1-methylpseudouracil
  modified_base 22: mod_base = OTHER; note = N1-methylpseudouracil
  modified_base 27: mod_base = OTHER; note = N1-methylpseudouracil
  modified_base 28: mod_base = OTHER; note = N1-methylpseudouracil
  modified_base 32: mod_base = OTHER; note = N1-methylpseudouracil
  modified_base 33: mod_base = OTHER; note = N1-methylpseudouracil
  modified_base 34: mod_base = OTHER; note = N1-methylpseudouracil
  modified_base 36: mod_base = OTHER; note = N1-methylpseudouracil
  modified_base 37: mod_base = OTHER; note = N1-methylpseudouracil
  modified_base 38: mod_base = OTHER; note = N1-methylpseudouracil
  modified_base 39: mod_base = OTHER; note = N1-methylpseudouracil
  modified_base 42: mod_base = OTHER; note = N1-methylpseudouracil
  modified_base 43: mod_base = OTHER; note = N1-methylpseudouracil
  modified_base 44: mod_base = OTHER; note = N1-methylpseudouracil
  modified_base 45: mod_base = OTHER; note = N1-methylpseudouracil
  modified_base 47: mod_base = OTHER; note = N1-methylpseudouracil
  modified_base 54: mod_base = OTHER; note = N1-methylpseudouracil
  modified_base 62: mod_base = OTHER; note = N1-methylpseudouracil
  modified_base 63: mod_base = OTHER; note = N1-methylpseudouracil
  modified_base 64: mod_base = OTHER; note = N1-methylpseudouracil
  modified_base 65: mod_base = OTHER; note = N1-methylpseudouracil
  modified_base 66: mod_base = OTHER; note = N1-methylpseudouracil
  modified_base 68: mod_base = OTHER; note = N1-methylpseudouracil
  modified_base 69: mod_base = OTHER; note = N1-methylpseudouracil
  modified_base 71: mod_base = OTHER; note = N1-methylpseudouracil
  modified_base 77: mod_base = OTHER; note = N1-methylpseudouracil
  modified_base 81: mod_base = OTHER; note = N1-methylpseudouracil
  modified_base 83: mod_base = OTHER; note = N1-methylpseudouracil
  modified_base 89: mod_base = OTHER; note = N1-methylpseudouracil
  modified_base 92: mod_base = OTHER; note = N1-methylpseudouracil
  modified_base 94: mod_base = OTHER; note = N1-methylpseudouracil
  modified_base 96: mod_base = OTHER; note = N1-methylpseudouracil
  modified_base 98: mod_base = OTHER; note = N1-methylpseudouracil
  modified_base 100: mod_base = OTHER; note = N1-methylpseudouracil
  modified_base 101: mod_base = OTHER; note = N1-methylpseudouracil
  modified_base 103: mod_base = OTHER; note = N1-methylpseudouracil
  modified_base 104: mod_base = OTHER; note = N1-methylpseudouracil
  modified_base 105: mod_base = OTHER; note = N1-methylpseudouracil
  modified_base 107: mod_base = OTHER; note = N1-methylpseudouracil
  modified_base 109: mod_base = OTHER; note = N1-methylpseudouracil
  modified_base 110: mod_base = OTHER; note = N1-methylpseudouracil
  modified_base 111: mod_base = OTHER; note = N1-methylpseudouracil
  modified_base 113: mod_base = OTHER; note = N1-methylpseudouracil
  modified_base 131: mod_base = OTHER; note = N1-methylpseudouracil
  modified_base 142: mod_base = OTHER; note = N1-methylpseudouracil
  modified_base 149: mod_base = OTHER; note = N1-methylpseudouracil
  modified_base 166: mod_base = OTHER; note = N1-methylpseudouracil
  modified_base 175: mod_base = OTHER; note = N1-methylpseudouracil
  modified_base 179: mod_base = OTHER; note = N1-methylpseudouracil
  modified_base 182: mod_base = OTHER; note = N1-methylpseudouracil
  modified_base 185: mod_base = OTHER; note = N1-methylpseudouracil
  modified_base 196: mod_base = OTHER; note = N1-methylpseudouracil
  modified_base 198: mod_base = OTHER; note = N1-methylpseudouracil
  modified_base 202: mod_base = OTHER; note = N1-methylpseudouracil
  modified_base 205: mod_base = OTHER; note = N1-methylpseudouracil
  modified_base 207: mod_base = OTHER; note = N1-methylpseudouracil
  modified_base 220: mod_base = OTHER; note = N1-methylpseudouracil
  modified_base 221: mod_base = OTHER; note = N1-methylpseudouracil
  modified_base 239: mod_base = OTHER; note = N1-methylpseudouracil
  modified_base 250: mod_base = OTHER; note = N1-methylpseudouracil
  modified_base 261: mod_base = OTHER; note = N1-methylpseudouracil
  modified_base 267: mod_base = OTHER; note = N1-methylpseudouracil
  modified_base 269: mod_base = OTHER; note = N1-methylpseudouracil
  modified_base 272: mod_base = OTHER; note = N1-methylpseudouracil
  modified_base 283: mod_base = OTHER; note = N1-methylpseudouracil
  modified_base 290: mod_base = OTHER; note = N1-methylpseudouracil
  modified_base 294: mod_base = OTHER; note = N1-methylpseudouracil
  modified_base 295: mod_base = OTHER; note = N1-methylpseudouracil
  modified_base 296: mod_base = OTHER; note = N1-methylpseudouracil
  modified_base 299: mod_base = OTHER; note = N1-methylpseudouracil
  modified_base 306: mod_base = OTHER; note = N1-methylpseudouracil
  modified_base 311: mod_base = OTHER; note = N1-methylpseudouracil
  modified_base 320: mod_base = OTHER; note = N1-methylpseudouracil
  modified_base 326: mod_base = OTHER; note = N1-methylpseudouracil
  modified_base 327: mod_base = OTHER; note = N1-methylpseudouracil
  modified_base 329: mod_base = OTHER; note = N1-methylpseudouracil
  modified_base 342: mod_base = OTHER; note = N1-methylpseudouracil
  modified_base 344: mod_base = OTHER; note = N1-methylpseudouracil
  modified_base 350: mod_base = OTHER; note = N1-methylpseudouracil
  modified_base 367: mod_base = OTHER; note = N1-methylpseudouracil
  modified_base 369: mod_base = OTHER; note = N1-methylpseudouracil
  modified_base 370: mod_base = OTHER; note = N1-methylpseudouracil
  modified_base 372: mod_base = OTHER; note = N1-methylpseudouracil
  modified_base 377: mod_base = OTHER; note = N1-methylpseudouracil
  modified_base 380: mod_base = OTHER; note = N1-methylpseudouracil
  modified_base 386: mod_base = OTHER; note = N1-methylpseudouracil
  modified_base 393: mod_base = OTHER; note = N1-methylpseudouracil
  modified_base 401: mod_base = OTHER; note = N1-methylpseudouracil
  modified_base 404: mod_base = OTHER; note = N1-methylpseudouracil
  modified_base 405: mod_base = OTHER; note = N1-methylpseudouracil
  modified_base 407: mod_base = OTHER; note = N1-methylpseudouracil
  modified_base 413: mod_base = OTHER; note = N1-methylpseudouracil
  modified_base 429: mod_base = OTHER; note = N1-methylpseudouracil
  modified_base 437: mod_base = OTHER; note = N1-methylpseudouracil
  modified_base 443: mod_base = OTHER; note = N1-methylpseudouracil
  modified_base 449: mod_base = OTHER; note = N1-methylpseudouracil
  modified_base 459: mod_base = OTHER; note = N1-methylpseudouracil
  modified_base 466: mod_base = OTHER; note = N1-methylpseudouracil
  modified_base 473: mod_base = OTHER; note = N1-methylpseudouracil
  modified_base 479: mod_base = OTHER; note = N1-methylpseudouracil
  modified_base 481: mod_base = OTHER; note = N1-methylpseudouracil
  modified_base 484: mod_base = OTHER; note = N1-methylpseudouracil
  modified_base 488: mod_base = OTHER; note = N1-methylpseudouracil
  modified_base 491: mod_base = OTHER; note = N1-methylpseudouracil
  modified_base 495: mod_base = OTHER; note = N1-methylpseudouracil
  modified_base 497: mod_base = OTHER; note = N1-methylpseudouracil
  modified_base 499: mod_base = OTHER; note = N1-methylpseudouracil
  modified_base 509: mod_base = OTHER; note = N1-methylpseudouracil
  modified_base 519: mod_base = OTHER; note = N1-methylpseudouracil
  modified_base 521: mod_base = OTHER; note = N1-methylpseudouracil
  modified_base 530: mod_base = OTHER; note = N1-methylpseudouracil
  modified_base 531: mod_base = OTHER; note = N1-methylpseudouracil
  modified_base 539: mod_base = OTHER; note = N1-methylpseudouracil
  modified_base 551: mod_base = OTHER; note = N1-methylpseudouracil
  modified_base 553: mod_base = OTHER; note = N1-methylpseudouracil
  modified_base 555: mod_base = OTHER; note = N1-methylpseudouracil
  modified_base 563: mod_base = OTHER; note = N1-methylpseudouracil
  modified_base 565: mod_base = OTHER; note = N1-methylpseudouracil
  modified_base 572: mod_base = OTHER; note = N1-methylpseudouracil
  modified_base 583: mod_base = OTHER; note = N1-methylpseudouracil
  modified_base 584: mod_base = OTHER; note = N1-methylpseudouracil
  modified_base 590: mod_base = OTHER; note = N1-methylpseudouracil
  modified_base 595: mod_base = OTHER; note = N1-methylpseudouracil
  modified_base 596: mod_base = OTHER; note = N1-methylpseudouracil
  modified_base 604: mod_base = OTHER; note = N1-methylpseudouracil
  modified_base 605: mod_base = OTHER; note = N1-methylpseudouracil
  modified_base 606: mod_base = OTHER; note = N1-methylpseudouracil
  modified_base 608: mod_base = OTHER; note = N1-methylpseudouracil
  modified_base 618: mod_base = OTHER; note = N1-methylpseudouracil
  modified_base 620: mod_base = OTHER; note = N1-methylpseudouracil
  modified_base 622: mod_base = OTHER; note = N1-methylpseudouracil
  modified_base 624: mod_base = OTHER; note = N1-methylpseudouracil
  modified_base 627: mod_base = OTHER; note = N1-methylpseudouracil
  modified_base 628: mod_base = OTHER; note = N1-methylpseudouracil
  modified_base 629: mod_base = OTHER; note = N1-methylpseudouracil
  modified_base 632: mod_base = OTHER; note = N1-methylpseudouracil
  modified_base 653: mod_base = OTHER; note = N1-methylpseudouracil
  modified_base 664: mod_base = OTHER; note = N1-methylpseudouracil
  modified_base 666: mod_base = OTHER; note = N1-methylpseudouracil
  modified_base 674: mod_base = OTHER; note = N1-methylpseudouracil
  modified_base 679: mod_base = OTHER; note = N1-methylpseudouracil
  modified_base 682: mod_base = OTHER; note = N1-methylpseudouracil
  modified_base 683: mod_base = OTHER; note = N1-methylpseudouracil
  modified_base 685: mod_base = OTHER; note = N1-methylpseudouracil
  modified_base 689: mod_base = OTHER; note = N1-methylpseudouracil
  modified_base 693: mod_base = OTHER; note = N1-methylpseudouracil
  modified_base 697: mod_base = OTHER; note = N1-methylpseudouracil
  modified_base 698: mod_base = OTHER; note = N1-methylpseudouracil
  modified_base 703: mod_base = OTHER; note = N1-methylpseudouracil
  modified_base 704: mod_base = OTHER; note = N1-methylpseudouracil
  modified_base 713: mod_base = OTHER; note = N1-methylpseudouracil
  modified_base 714: mod_base = OTHER; note = N1-methylpseudouracil
  modified_base 716: mod_base = OTHER; note = N1-methylpseudouracil
  modified_base 720: mod_base = OTHER; note = N1-methylpseudouracil
  modified_base 722: mod_base = OTHER; note = N1-methylpseudouracil
  modified_base 742: mod_base = OTHER; note = N1-methylpseudouracil
  modified_base 743: mod_base = OTHER; note = N1-methylpseudouracil
  modified_base 744: mod_base = OTHER; note = N1-methylpseudouracil
  modified_base 752: mod_base = OTHER; note = N1-methylpseudouracil
  modified_base 755: mod_base = OTHER; note = N1-methylpseudouracil
  modified_base 762: mod_base = OTHER; note = N1-methylpseudouracil
  modified_base 770: mod_base = OTHER; note = N1-methylpseudouracil
  modified_base 782: mod_base = OTHER; note = N1-methylpseudouracil
  modified_base 783: mod_base = OTHER; note = N1-methylpseudouracil
  modified_base 786: mod_base = OTHER; note = N1-methylpseudouracil
  modified_base 789: mod_base = OTHER; note = N1-methylpseudouracil
  modified_base 792: mod_base = OTHER; note = N1-methylpseudouracil
  modified_base 802: mod_base = OTHER; note = N1-methylpseudouracil
  modified_base 803: mod_base = OTHER; note = N1-methylpseudouracil
  modified_base 812: mod_base = OTHER; note = N1-methylpseudouracil
  modified_base 815: mod_base = OTHER; note = N1-methylpseudouracil
  modified_base 822: mod_base = OTHER; note = N1-methylpseudouracil
  modified_base 827: mod_base = OTHER; note = N1-methylpseudouracil
  modified_base 829: mod_base = OTHER; note = N1-methylpseudouracil
  modified_base 842: mod_base = OTHER; note = N1-methylpseudouracil
  modified_base 847: mod_base = OTHER; note = N1-methylpseudouracil
  modified_base 863: mod_base = OTHER; note = N1-methylpseudouracil
  modified_base 869: mod_base = OTHER; note = N1-methylpseudouracil
  modified_base 872: mod_base = OTHER; note = N1-methylpseudouracil
  modified_base 875: mod_base = OTHER; note = N1-methylpseudouracil
  modified_base 877: mod_base = OTHER; note = N1-methylpseudouracil
  modified_base 878: mod_base = OTHER; note = N1-methylpseudouracil
  modified_base 881: mod_base = OTHER; note = N1-methylpseudouracil
  modified_base 901: mod_base = OTHER; note = N1-methylpseudouracil
  modified_base 902: mod_base = OTHER; note = N1-methylpseudouracil
  modified_base 903: mod_base = OTHER; note = N1-methylpseudouracil
  modified_base 908: mod_base = OTHER; note = N1-methylpseudouracil
  modified_base 913: mod_base = OTHER; note = N1-methylpseudouracil
  modified_base 920: mod_base = OTHER; note = N1-methylpseudouracil
  modified_base 929: mod_base = OTHER; note = N1-methylpseudouracil
  modified_base 932: mod_base = OTHER; note = N1-methylpseudouracil
  modified_base 935: mod_base = OTHER; note = N1-methylpseudouracil
  modified_base 950: mod_base = OTHER; note = N1-methylpseudouracil
  modified_base 952: mod_base = OTHER; note = N1-methylpseudouracil
  modified_base 954: mod_base = OTHER; note = N1-methylpseudouracil
  modified_base 959: mod_base = OTHER; note = N1-methylpseudouracil
  modified_base 963: mod_base = OTHER; note = N1-methylpseudouracil
  modified_base 964: mod_base = OTHER; note = N1-methylpseudouracil
  modified_base 976: mod_base = OTHER; note = N1-methylpseudouracil
  modified_base 983: mod_base = OTHER; note = N1-methylpseudouracil
  modified_base 992: mod_base = OTHER; note = N1-methylpseudouracil
  modified_base 995: mod_base = OTHER; note = N1-methylpseudouracil
  modified_base 1000: mod_base = OTHER; note = N1-methylpseudouracil
  modified_base 1010: mod_base = OTHER; note = N1-methylpseudouracil
  modified_base 1011: mod_base = OTHER; note = N1-methylpseudouracil
  modified_base 1019: mod_base = OTHER; note = N1-methylpseudouracil
  modified_base 1022: mod_base = OTHER; note = N1-methylpseudouracil
  modified_base 1023: mod_base = OTHER; note = N1-methylpseudouracil
  modified_base 1026: mod_base = OTHER; note = N1-methylpseudouracil
  modified_base 1031: mod_base = OTHER; note = N1-methylpseudouracil
  modified_base 1034: mod_base = OTHER; note = N1-methylpseudouracil
  modified_base 1046: mod_base = OTHER; note = N1-methylpseudouracil
  modified_base 1049: mod_base = OTHER; note = N1-methylpseudouracil
  modified_base 1052: mod_base = OTHER; note = N1-methylpseudouracil
  modified_base 1055: mod_base = OTHER; note = N1-methylpseudouracil
  modified_base 1057: mod_base = OTHER; note = N1-methylpseudouracil
  modified_base 1058: mod_base = OTHER; note = N1-methylpseudouracil
  modified_base 1059: mod_base = OTHER; note = N1-methylpseudouracil
  modified_base 1064: mod_base = OTHER; note = N1-methylpseudouracil
  modified_base 1079: mod_base = OTHER; note = N1-methylpseudouracil
  modified_base 1085: mod_base = OTHER; note = N1-methylpseudouracil
  modified_base 1087: mod_base = OTHER; note = N1-methylpseudouracil
  modified_base 1095: mod_base = OTHER; note = N1-methylpseudouracil
  modified_base 1096: mod_base = OTHER; note = N1-methylpseudouracil
  modified_base 1106: mod_base = OTHER; note = N1-methylpseudouracil
  modified_base 1109: mod_base = OTHER; note = N1-methylpseudouracil
  modified_base 1122: mod_base = OTHER; note = N1-methylpseudouracil
  modified_base 1124: mod_base = OTHER; note = N1-methylpseudouracil
  modified_base 1130: mod_base = OTHER; note = N1-methylpseudouracil
  modified_base 1133: mod_base = OTHER; note = N1-methylpseudouracil
  modified_base 1144: mod_base = OTHER; note = N1-methylpseudouracil
  modified_base 1154: mod_base = OTHER; note = N1-methylpseudouracil
  modified_base 1157: mod_base = OTHER; note = N1-methylpseudouracil
  modified_base 1163: mod_base = OTHER; note = N1-methylpseudouracil
  modified_base 1166: mod_base = OTHER; note = N1-methylpseudouracil
  modified_base 1169: mod_base = OTHER; note = N1-methylpseudouracil
  modified_base 1171: mod_base = OTHER; note = N1-methylpseudouracil
  modified_base 1177: mod_base = OTHER; note = N1-methylpseudouracil
  modified_base 1187: mod_base = OTHER; note = N1-methylpseudouracil
  modified_base 1199: mod_base = OTHER; note = N1-methylpseudouracil
  modified_base 1205: mod_base = OTHER; note = N1-methylpseudouracil
  modified_base 1211: mod_base = OTHER; note = N1-methylpseudouracil
  modified_base 1214: mod_base = OTHER; note = N1-methylpseudouracil
  modified_base 1232: mod_base = OTHER; note = N1-methylpseudouracil
  modified_base 1238: mod_base = OTHER; note = N1-methylpseudouracil
  modified_base 1243: mod_base = OTHER; note = N1-methylpseudouracil
  modified_base 1244: mod_base = OTHER; note = N1-methylpseudouracil
  modified_base 1245: mod_base = OTHER; note = N1-methylpseudouracil
  modified_base 1253: mod_base = OTHER; note = N1-methylpseudouracil
  modified_base 1255: mod_base = OTHER; note = N1-methylpseudouracil
  modified_base 1257: mod_base = OTHER; note = N1-methylpseudouracil
  modified_base 1269: mod_base = OTHER; note = N1-methylpseudouracil
  modified_base 1271: mod_base = OTHER; note = N1-methylpseudouracil
  modified_base 1273: mod_base = OTHER; note = N1-methylpseudouracil
  modified_base 1274: mod_base = OTHER; note = N1-methylpseudouracil
  modified_base 1291: mod_base = OTHER; note = N1-methylpseudouracil
  modified_base 1294: mod_base = OTHER; note = N1-methylpseudouracil
  modified_base 1296: mod_base = OTHER; note = N1-methylpseudouracil
  modified_base 1301: mod_base = OTHER; note = N1-methylpseudouracil
  modified_base 1307: mod_base = OTHER; note = N1-methylpseudouracil
  modified_base 1321: mod_base = OTHER; note = N1-methylpseudouracil
  modified_base 1324: mod_base = OTHER; note = N1-methylpseudouracil
  modified_base 1325: mod_base = OTHER; note = N1-methylpseudouracil
  modified_base 1331: mod_base = OTHER; note = N1-methylpseudouracil
  modified_base 1337: mod_base = OTHER; note = N1-methylpseudouracil
  modified_base 1343: mod_base = OTHER; note = N1-methylpseudouracil
  modified_base 1347: mod_base = OTHER; note = N1-methylpseudouracil
  modified_base 1351: mod_base = OTHER; note = N1-methylpseudouracil
  modified_base 1353: mod_base = OTHER; note = N1-methylpseudouracil
  modified_base 1373: mod_base = OTHER; note = N1-methylpseudouracil
  modified_base 1376: mod_base = OTHER; note = N1-methylpseudouracil
  modified_base 1379: mod_base = OTHER; note = N1-methylpseudouracil
  modified_base 1388: mod_base = OTHER; note = N1-methylpseudouracil
  modified_base 1394: mod_base = OTHER; note = N1-methylpseudouracil
  modified_base 1406: mod_base = OTHER; note = N1-methylpseudouracil
  modified_base 1412: mod_base = OTHER; note = N1-methylpseudouracil
  modified_base 1415: mod_base = OTHER; note = N1-methylpseudouracil
  modified_base 1418: mod_base = OTHER; note = N1-methylpseudouracil
  modified_base 1420: mod_base = OTHER; note = N1-methylpseudouracil
  modified_base 1425: mod_base = OTHER; note = N1-methylpseudouracil
  modified_base 1429: mod_base = OTHER; note = N1-methylpseudouracil
  modified_base 1431: mod_base = OTHER; note = N1-methylpseudouracil
  modified_base 1435: mod_base = OTHER; note = N1-methylpseudouracil
  modified_base 1441: mod_base = OTHER; note = N1-methylpseudouracil
  modified_base 1454: mod_base = OTHER; note = N1-methylpseudouracil
  modified_base 1460: mod_base = OTHER; note = N1-methylpseudouracil
  modified_base 1468: mod_base = OTHER; note = N1-methylpseudouracil
  modified_base 1470: mod_base = OTHER; note = N1-methylpseudouracil
  modified_base 1474: mod_base = OTHER; note = N1-methylpseudouracil
  modified_base 1495: mod_base = OTHER; note = N1-methylpseudouracil
  modified_base 1496: mod_base = OTHER; note = N1-methylpseudouracil
  modified_base 1501: mod_base = OTHER; note = N1-methylpseudouracil
  modified_base 1508: mod_base = OTHER; note = N1-methylpseudouracil
  modified_base 1510: mod_base = OTHER; note = N1-methylpseudouracil
  modified_base 1516: mod_base = OTHER; note = N1-methylpseudouracil
  modified_base 1532: mod_base = OTHER; note = N1-methylpseudouracil
  modified_base 1539: mod_base = OTHER; note = N1-methylpseudouracil
  modified_base 1543: mod_base = OTHER; note = N1-methylpseudouracil
  modified_base 1549: mod_base = OTHER; note = N1-methylpseudouracil
  modified_base 1562: mod_base = OTHER; note = N1-methylpseudouracil
  modified_base 1565: mod_base = OTHER; note = N1-methylpseudouracil
  modified_base 1567: mod_base = OTHER; note = N1-methylpseudouracil
  modified_base 1569: mod_base = OTHER; note = N1-methylpseudouracil
  modified_base 1579: mod_base = OTHER; note = N1-methylpseudouracil
  modified_base 1593: mod_base = OTHER; note = N1-methylpseudouracil
  modified_base 1602: mod_base = OTHER; note = N1-methylpseudouracil
  modified_base 1606: mod_base = OTHER; note = N1-methylpseudouracil
  modified_base 1609: mod_base = OTHER; note = N1-methylpseudouracil
  modified_base 1611: mod_base = OTHER; note = N1-methylpseudouracil
  modified_base 1624: mod_base = OTHER; note = N1-methylpseudouracil
  modified_base 1627: mod_base = OTHER; note = N1-methylpseudouracil
  modified_base 1630: mod_base = OTHER; note = N1-methylpseudouracil
  modified_base 1639: mod_base = OTHER; note = N1-methylpseudouracil
  modified_base 1643: mod_base = OTHER; note = N1-methylpseudouracil
  modified_base 1645: mod_base = OTHER; note = N1-methylpseudouracil
  modified_base 1652: mod_base = OTHER; note = N1-methylpseudouracil
  modified_base 1654: mod_base = OTHER; note = N1-methylpseudouracil
  modified_base 1659: mod_base = OTHER; note = N1-methylpseudouracil
  modified_base 1660: mod_base = OTHER; note = N1-methylpseudouracil
  modified_base 1670: mod_base = OTHER; note = N1-methylpseudouracil
  modified_base 1671: mod_base = OTHER; note = N1-methylpseudouracil
  modified_base 1672: mod_base = OTHER; note = N1-methylpseudouracil
  modified_base 1681: mod_base = OTHER; note = N1-methylpseudouracil
  modified_base 1684: mod_base = OTHER; note = N1-methylpseudouracil
  modified_base 1690: mod_base = OTHER; note = N1-methylpseudouracil
  modified_base 1692: mod_base = OTHER; note = N1-methylpseudouracil
  modified_base 1695: mod_base = OTHER; note = N1-methylpseudouracil
  modified_base 1699: mod_base = OTHER; note = N1-methylpseudouracil
  modified_base 1700: mod_base = OTHER; note = N1-methylpseudouracil
  modified_base 1701: mod_base = OTHER; note = N1-methylpseudouracil
  modified_base 1702: mod_base = OTHER; note = N1-methylpseudouracil
  modified_base 1705: mod_base = OTHER; note = N1-methylpseudouracil
  modified_base 1709: mod_base = OTHER; note = N1-methylpseudouracil
  modified_base 1724: mod_base = OTHER; note = N1-methylpseudouracil
  modified_base 1727: mod_base = OTHER; note = N1-methylpseudouracil
  modified_base 1729: mod_base = OTHER; note = N1-methylpseudouracil
  modified_base 1740: mod_base = OTHER; note = N1-methylpseudouracil
  modified_base 1747: mod_base = OTHER; note = N1-methylpseudouracil
  modified_base 1753: mod_base = OTHER; note = N1-methylpseudouracil
  modified_base 1762: mod_base = OTHER; note = N1-methylpseudouracil
  modified_base 1766: mod_base = OTHER; note = N1-methylpseudouracil
  modified_base 1768: mod_base = OTHER; note = N1-methylpseudouracil
  modified_base 1770: mod_base = OTHER; note = N1-methylpseudouracil
  modified_base 1780: mod_base = OTHER; note = N1-methylpseudouracil
  modified_base 1792: mod_base = OTHER; note = N1-methylpseudouracil
  modified_base 1795: mod_base = OTHER; note = N1-methylpseudouracil
  modified_base 1801: mod_base = OTHER; note = N1-methylpseudouracil
  modified_base 1806: mod_base = OTHER; note = N1-methylpseudouracil
  modified_base 1809: mod_base = OTHER; note = N1-methylpseudouracil
  modified_base 1810: mod_base = OTHER; note = N1-methylpseudouracil
  modified_base 1815: mod_base = OTHER; note = N1-methylpseudouracil
  modified_base 1822: mod_base = OTHER; note = N1-methylpseudouracil
  modified_base 1824: mod_base = OTHER; note = N1-methylpseudouracil
  modified_base 1826: mod_base = OTHER; note = N1-methylpseudouracil
  modified_base 1841: mod_base = OTHER; note = N1-methylpseudouracil
  modified_base 1844: mod_base = OTHER; note = N1-methylpseudouracil
  modified_base 1846: mod_base = OTHER; note = N1-methylpseudouracil
  modified_base 1848: mod_base = OTHER; note = N1-methylpseudouracil
  modified_base 1849: mod_base = OTHER; note = N1-methylpseudouracil
  modified_base 1851: mod_base = OTHER; note = N1-methylpseudouracil
  modified_base 1864: mod_base = OTHER; note = N1-methylpseudouracil
  modified_base 1868: mod_base = OTHER; note = N1-methylpseudouracil
  modified_base 1870: mod_base = OTHER; note = N1-methylpseudouracil
  modified_base 1879: mod_base = OTHER; note = N1-methylpseudouracil
  modified_base 1883: mod_base = OTHER; note = N1-methylpseudouracil
  modified_base 1885: mod_base = OTHER; note = N1-methylpseudouracil
  modified_base 1890: mod_base = OTHER; note = N1-methylpseudouracil
  modified_base 1893: mod_base = OTHER; note = N1-methylpseudouracil
  modified_base 1903: mod_base = OTHER; note = N1-methylpseudouracil
  modified_base 1915: mod_base = OTHER; note = N1-methylpseudouracil
  modified_base 1924: mod_base = OTHER; note = N1-methylpseudouracil
  modified_base 1926: mod_base = OTHER; note = N1-methylpseudouracil
  modified_base 1933: mod_base = OTHER; note = N1-methylpseudouracil
  modified_base 1944: mod_base = OTHER; note = N1-methylpseudouracil
  modified_base 1945: mod_base = OTHER; note = N1-methylpseudouracil
  modified_base 1960: mod_base = OTHER; note = N1-methylpseudouracil
  modified_base 1963: mod_base = OTHER; note = N1-methylpseudouracil
  modified_base 1967: mod_base = OTHER; note = N1-methylpseudouracil
  modified_base 1972: mod_base = OTHER; note = N1-methylpseudouracil
  modified_base 1979: mod_base = OTHER; note = N1-methylpseudouracil
  modified_base 1981: mod_base = OTHER; note = N1-methylpseudouracil
  modified_base 2008: mod_base = OTHER; note = N1-methylpseudouracil
  modified_base 2012: mod_base = OTHER; note = N1-methylpseudouracil
  modified_base 2016: mod_base = OTHER; note = N1-methylpseudouracil
  modified_base 2020: mod_base = OTHER; note = N1-methylpseudouracil
  modified_base 2022: mod_base = OTHER; note = N1-methylpseudouracil
  modified_base 2027: mod_base = OTHER; note = N1-methylpseudouracil
  modified_base 2037: mod_base = OTHER; note = N1-methylpseudouracil
  modified_base 2042: mod_base = OTHER; note = N1-methylpseudouracil
  modified_base 2043: mod_base = OTHER; note = N1-methylpseudouracil
  modified_base 2059: mod_base = OTHER; note = N1-methylpseudouracil
  modified_base 2060: mod_base = OTHER; note = N1-methylpseudouracil
  modified_base 2062: mod_base = OTHER; note = N1-methylpseudouracil
  modified_base 2078: mod_base = OTHER; note = N1-methylpseudouracil
  modified_base 2083: mod_base = OTHER; note = N1-methylpseudouracil
  modified_base 2086: mod_base = OTHER; note = N1-methylpseudouracil
  modified_base 2090: mod_base = OTHER; note = N1-methylpseudouracil
  modified_base 2107: mod_base = OTHER; note = N1-methylpseudouracil
  modified_base 2111: mod_base = OTHER; note = N1-methylpseudouracil
  modified_base 2114: mod_base = OTHER; note = N1-methylpseudouracil
  modified_base 2118: mod_base = OTHER; note = N1-methylpseudouracil
  modified_base 2119: mod_base = OTHER; note = N1-methylpseudouracil
  modified_base 2120: mod_base = OTHER; note = N1-methylpseudouracil
  modified_base 2123: mod_base = OTHER; note = N1-methylpseudouracil
  modified_base 2126: mod_base = OTHER; note = N1-methylpseudouracil
  modified_base 2133: mod_base = OTHER; note = N1-methylpseudouracil
  modified_base 2136: mod_base = OTHER; note = N1-methylpseudouracil
  modified_base 2153: mod_base = OTHER; note = N1-methylpseudouracil
  modified_base 2156: mod_base = OTHER; note = N1-methylpseudouracil
  modified_base 2157: mod_base = OTHER; note = N1-methylpseudouracil
  modified_base 2161: mod_base = OTHER; note = N1-methylpseudouracil
  modified_base 2163: mod_base = OTHER; note = N1-methylpseudouracil
  modified_base 2165: mod_base = OTHER; note = N1-methylpseudouracil
  modified_base 2178: mod_base = OTHER; note = N1-methylpseudouracil
  modified_base 2179: mod_base = OTHER; note = N1-methylpseudouracil
  modified_base 2181: mod_base = OTHER; note = N1-methylpseudouracil
  modified_base 2198: mod_base = OTHER; note = N1-methylpseudouracil
  modified_base 2199: mod_base = OTHER; note = N1-methylpseudouracil
  modified_base 2204: mod_base = OTHER; note = N1-methylpseudouracil
  modified_base 2207: mod_base = OTHER; note = N1-methylpseudouracil
  modified_base 2210: mod_base = OTHER; note = N1-methylpseudouracil
  modified_base 2213: mod_base = OTHER; note = N1-methylpseudouracil
  modified_base 2219: mod_base = OTHER; note = N1-methylpseudouracil
  modified_base 2221: mod_base = OTHER; note = N1-methylpseudouracil
  modified_base 2225: mod_base = OTHER; note = N1-methylpseudouracil
  modified_base 2231: mod_base = OTHER; note = N1-methylpseudouracil
  modified_base 2234: mod_base = OTHER; note = N1-methylpseudouracil
  modified_base 2237: mod_base = OTHER; note = N1-methylpseudouracil
  modified_base 2240: mod_base = OTHER; note = N1-methylpseudouracil
  modified_base 2246: mod_base = OTHER; note = N1-methylpseudouracil
  modified_base 2249: mod_base = OTHER; note = N1-methylpseudouracil
  modified_base 2252: mod_base = OTHER; note = N1-methylpseudouracil
  modified_base 2255: mod_base = OTHER; note = N1-methylpseudouracil
  modified_base 2257: mod_base = OTHER; note = N1-methylpseudouracil
  modified_base 2261: mod_base = OTHER; note = N1-methylpseudouracil
  modified_base 2263: mod_base = OTHER; note = N1-methylpseudouracil
  modified_base 2270: mod_base = OTHER; note = N1-methylpseudouracil
  modified_base 2273: mod_base = OTHER; note = N1-methylpseudouracil
  modified_base 2276: mod_base = OTHER; note = N1-methylpseudouracil
  modified_base 2278: mod_base = OTHER; note = N1-methylpseudouracil
  modified_base 2281: mod_base = OTHER; note = N1-methylpseudouracil
  modified_base 2282: mod_base = OTHER; note = N1-methylpseudouracil
  modified_base 2300: mod_base = OTHER; note = N1-methylpseudouracil
  modified_base 2308: mod_base = OTHER; note = N1-methylpseudouracil
  modified_base 2309: mod_base = OTHER; note = N1-methylpseudouracil
  modified_base 2310: mod_base = OTHER; note = N1-methylpseudouracil
  modified_base 2323: mod_base = OTHER; note = N1-methylpseudouracil
  modified_base 2325: mod_base = OTHER; note = N1-methylpseudouracil
  modified_base 2335: mod_base = OTHER; note = N1-methylpseudouracil
  modified_base 2352: mod_base = OTHER; note = N1-methylpseudouracil
  modified_base 2355: mod_base = OTHER; note = N1-methylpseudouracil
  modified_base 2357: mod_base = OTHER; note = N1-methylpseudouracil
  modified_base 2359: mod_base = OTHER; note = N1-methylpseudouracil
  modified_base 2368: mod_base = OTHER; note = N1-methylpseudouracil
  modified_base 2370: mod_base = OTHER; note = N1-methylpseudouracil
  modified_base 2373: mod_base = OTHER; note = N1-methylpseudouracil
  modified_base 2374: mod_base = OTHER; note = N1-methylpseudouracil
  modified_base 2376: mod_base = OTHER; note = N1-methylpseudouracil
  modified_base 2380: mod_base = OTHER; note = N1-methylpseudouracil
  modified_base 2381: mod_base = OTHER; note = N1-methylpseudouracil
  modified_base 2390: mod_base = OTHER; note = N1-methylpseudouracil
  modified_base 2394: mod_base = OTHER; note = N1-methylpseudouracil
  modified_base 2395: mod_base = OTHER; note = N1-methylpseudouracil
  modified_base 2420: mod_base = OTHER; note = N1-methylpseudouracil
  modified_base 2426: mod_base = OTHER; note = N1-methylpseudouracil
  modified_base 2428: mod_base = OTHER; note = N1-methylpseudouracil
  modified_base 2436: mod_base = OTHER; note = N1-methylpseudouracil
  modified_base 2437: mod_base = OTHER; note = N1-methylpseudouracil
  modified_base 2450: mod_base = OTHER; note = N1-methylpseudouracil
  modified_base 2457: mod_base = OTHER; note = N1-methylpseudouracil
  modified_base 2462: mod_base = OTHER; note = N1-methylpseudouracil
  modified_base 2465: mod_base = OTHER; note = N1-methylpseudouracil
  modified_base 2471: mod_base = OTHER; note = N1-methylpseudouracil
  modified_base 2482: mod_base = OTHER; note = N1-methylpseudouracil
  modified_base 2488: mod_base = OTHER; note = N1-methylpseudouracil
  modified_base 2500: mod_base = OTHER; note = N1-methylpseudouracil
  modified_base 2504: mod_base = OTHER; note = N1-methylpseudouracil
  modified_base 2509: mod_base = OTHER; note = N1-methylpseudouracil
  modified_base 2513: mod_base = OTHER; note = N1-methylpseudouracil
  modified_base 2514: mod_base = OTHER; note = N1-methylpseudouracil
  modified_base 2516: mod_base = OTHER; note = N1-methylpseudouracil
  modified_base 2517: mod_base = OTHER; note = N1-methylpseudouracil
  modified_base 2523: mod_base = OTHER; note = N1-methylpseudouracil
  modified_base 2524: mod_base = OTHER; note = N1-methylpseudouracil
  modified_base 2530: mod_base = OTHER; note = N1-methylpseudouracil
  modified_base 2543: mod_base = OTHER; note = N1-methylpseudouracil
  modified_base 2546: mod_base = OTHER; note = N1-methylpseudouracil
  modified_base 2551: mod_base = OTHER; note = N1-methylpseudouracil
  modified_base 2552: mod_base = OTHER; note = N1-methylpseudouracil
  modified_base 2555: mod_base = OTHER; note = N1-methylpseudouracil
  modified_base 2563: mod_base = OTHER; note = N1-methylpseudouracil
  modified_base 2579: mod_base = OTHER; note = N1-methylpseudouracil
  modified_base 2580: mod_base = OTHER; note = N1-methylpseudouracil
  modified_base 2582: mod_base = OTHER; note = N1-methylpseudouracil
  modified_base 2588: mod_base = OTHER; note = N1-methylpseudouracil
  modified_base 2593: mod_base = OTHER; note = N1-methylpseudouracil
  modified_base 2596: mod_base = OTHER; note = N1-methylpseudouracil
  modified_base 2598: mod_base = OTHER; note = N1-methylpseudouracil
  modified_base 2599: mod_base = OTHER; note = N1-methylpseudouracil
  modified_base 2600: mod_base = OTHER; note = N1-methylpseudouracil
  modified_base 2604: mod_base = OTHER; note = N1-methylpseudouracil
  modified_base 2609: mod_base = OTHER; note = N1-methylpseudouracil
  modified_base 2611: mod_base = OTHER; note = N1-methylpseudouracil
  modified_base 2615: mod_base = OTHER; note = N1-methylpseudouracil
ggaaatcgcaaaatttgctcttcgcgttagatttcttttagttttctcgcaactagcaagctttttgttctcgccatgggtatcgagctgctgtgtctgttctttctgtttctgggccgcaacgaccacgtccagggcggctgcgccctgggcggggccgagacctgcgaggactgcctgctcatcgggccacagtgtgcctggtgtgcacaggagaacttcacccaccccagcggggtgggcgagaggtgcgacacccctgcaaatctgctggcaaagggctgccagctgaatttcatcgagaatcccgtcagccaggtggagattctcaagaacaagcctctgagcgtcggacggcagaagaactcttctgacatcgtccagatcgcacctcagagcctgattctgaagctccgcccaggcggagctcagaccctccaggtccacgtcaggcagactgaggactaccccgtggacctgtactacctgatggatctgtccgccagcatggacgacgatctgaacaccattaaggagctgggcagccggctctctaaggagatgtccaagctcaccagcaacttcaggctgggattcggcagctttgtcgagaagcctgtgtctcctttcgtgaagaccacaccagaggagatcgcaaacccctgtagcagcatcccctacttctgcctgcctacattcgggttcaagcacattctgcctctgaccaacgacgcagagcgctttaacgagatcgtgaagaatcagaagatcagcgccaacattgatactcctgagggcggcttcgacgccatcatgcaggctgccgtctgcaaggagaagatcgggtggaggaacgacagcctccacctgctcgtgttcgtgagcgacgccgacagccactttgggatggactccaagctggccggcatcgtgatccccaacgacgggctgtgtcacctcgattccaagaacgagtacagcatgagcaccgtgctggagtaccccaccattgggcagctcattgataagctcgtgcagaacaacgtcctgctgatctttgcagtgacacaggagcaggtgcacctgtacgagaattacgcaaagctcatccccggagccactgtgggcctcctgcagaaggactccgggaacatcctccagctcatcatctccgcctacgaggagctgaggagcgaggtggagctcgaggtcctcggggacaccgagggcctcaacctgagctttaccgccatctgtaacaacggaactctcttccagcaccagaagaagtgctctcacatgaaggtgggcgacaccgcctccttcagcgtgaccgtgaacatccctcactgtgagcggcggagccgccacatcatcatcaagcccgtggggctcggggacgccctggagctcctggtgtcccctgagtgtaactgcgactgccagaaggaggtcgaggtgaacagctctaagtgccaccacggcaacgggagcttccagtgcggggtgtgcgcatgccaccccggccacatggggcctcgctgcgagtgcggcgaggacatgctgtctaccgacagctgcaaggaggcccctgaccaccctagctgctctggccgcggagactgctactgcggccagtgcatctgccacctgtccccttacgggaacatttacgggccctactgccagtgtgataacttttcctgcgtgcggcacaagggcctgctgtgcggaggaaatggcgactgcgactgcggcgagtgcgtctgtcgcagcggctggaccggggagtactgcaactgcactacttccactgacagctgtgtcagcgaggacggggtgctctgttctggccgcggggactgcgtctgcggcaagtgcgtgtgcactaatccaggggcctccgggcccacctgcgagcggtgtcccacctgcggggacccttgcaacagcaagaggtcctgcatcgagtgccacctgtccgccgccggacaggcacgcgaggagtgcgtcgataagtgtaagctcgccggagctacaattagcgaggaggaggacttctccaaggacgggagcgtgagctgctccctccagggagagaacgagtgcctgatcactttcctcatcaccactgataacgagggaaagacaatcattcactctatcaacgagaaggattgtcccaagcccccaaacattcccatgatcatgctgggagtgtccctggcaatcctgctgatcggagtcgtgctgctctgcatctggaagctgctcgtctccttccacgaccgcaaggaggtcgcaaagtttgaggccgagcggtctaaggccaagtggcagacagggaccaatcctctctaccgcgggtctacttctaccttcaagaacgtgacttacaagcacagggagaagcagaaggtggacctctccaccgattgcgggaagcccatccccaatcccctgctgggcctggacagcacctaaagctccccgggggcctcggtggcctagcttcttgccccttgggcctccccccagcccctcctccccttcctgcacccgtaccccccaaacaccattgtcacactccagtggtctttgaataaagtctgagtgggcggc

SEQ ID NO: 168 - RNA, 2622 nt, unidentified; identical to SEQ ID NO: 166
  source 1..2622: mol_type = unassigned RNA
  modified_base 6: mod_base = OTHER; note = N1-methylpseudouracil
  modified_base 14: mod_base = OTHER; note = N1-methylpseudouracil
  modified_base 15: mod_base = OTHER; note = N1-methylpseudouracil
  modified_base 16: mod_base = OTHER; note = N1-methylpseudouracil
  modified_base 19: mod_base = OTHER; note = N1-methylpseudouracil
  modified_base 21: mod_base = OTHER; note = N1-methylpseudouracil
  modified_base 22: mod_base = OTHER; note = N1-methylpseudouracil
  modified_base 27: mod_base = OTHER; note = N1-methylpseudouracil
  modified_base 28: mod_base = OTHER; note = N1-methylpseudouracil
  modified_base 32: mod_base = OTHER; note = N1-methylpseudouracil
  modified_base 33: mod_base = OTHER; note = N1-methylpseudouracil
  modified_base 34: mod_base = OTHER; note = N1-methylpseudouracil
  modified_base 36: mod_base = OTHER; note = N1-methylpseudouracil
  modified_base 37: mod_base = OTHER; note = N1-methylpseudouracil
  modified_base 38: mod_base = OTHER; note = N1-methylpseudouracil
  modified_base 39: mod_base = OTHER; note = N1-methylpseudouracil
  modified_base 42: mod_base = OTHER; note = N1-methylpseudouracil
  modified_base 43: mod_base = OTHER; note = N1-methylpseudouracil
  modified_base 44: mod_base = OTHER; note = N1-methylpseudouracil
  modified_base 45: mod_base = OTHER; note = N1-methylpseudouracil
  modified_base 47: mod_base = OTHER; note = N1-methylpseudouracil
  modified_base 54: mod_base = OTHER; note = N1-methylpseudouracil
  modified_base 62: mod_base = OTHER; note = N1-methylpseudouracil
  modified_base 63: mod_base = OTHER; note = N1-methylpseudouracil
  modified_base 64: mod_base = OTHER; note = N1-methylpseudouracil
  modified_base 65: mod_base = OTHER; note = N1-methylpseudouracil
  modified_base 66: mod_base = OTHER; note = N1-methylpseudouracil
  modified_base 68: mod_base = OTHER; note = N1-methylpseudouracil
  modified_base 69: mod_base = OTHER; note = N1-methylpseudouracil
  modified_base 71: mod_base = OTHER; note = N1-methylpseudouracil
  modified_base 77: mod_base = OTHER; note = N1-methylpseudouracil
  modified_base 81: mod_base = OTHER; note = N1-methylpseudouracil
  modified_base 83: mod_base = OTHER; note = N1-methylpseudouracil
  modified_base 89: mod_base = OTHER; note = N1-methylpseudouracil
  modified_base 92: mod_base = OTHER; note = N1-methylpseudouracil
  modified_base 94: mod_base = OTHER; note = N1-methylpseudouracil
  modified_base 96: mod_base = OTHER; note = N1-methylpseudouracil
  modified_base 98: mod_base = OTHER; note = N1-methylpseudouracil
  modified_base 100: mod_base = OTHER; note = N1-methylpseudouracil
  modified_base 101: mod_base = OTHER; note = N1-methylpseudouracil
  modified_base 103: mod_base = OTHER; note = N1-methylpseudouracil
  modified_base 104: mod_base = OTHER; note = N1-methylpseudouracil
  modified_base 105: mod_base = OTHER; note = N1-methylpseudouracil
  modified_base 107: mod_base = OTHER; note = N1-methylpseudouracil
  modified_base 109: mod_base = OTHER; note = N1-methylpseudouracil
  modified_base 110: mod_base = OTHER; note = N1-methylpseudouracil
  modified_base 111: mod_base = OTHER; note = N1-methylpseudouracil
  modified_base 113: mod_base = OTHER; note = N1-methylpseudouracil
  modified_base 131: mod_base = OTHER; note = N1-methylpseudouracil
  modified_base 142: mod_base = OTHER; note = N1-methylpseudouracil
  modified_base 149: mod_base = OTHER; note = N1-methylpseudouracil
  modified_base 166: mod_base = OTHER; note = N1-methylpseudouracil
  modified_base 175: mod_base = OTHER; note = N1-methylpseudouracil
  modified_base 179: mod_base = OTHER; note = N1-methylpseudouracil
  modified_base 182: mod_base = OTHER; note = N1-methylpseudouracil
  modified_base 185: mod_base = OTHER; note = N1-methylpseudouracil
  modified_base 196: mod_base = OTHER; note = N1-methylpseudouracil
  modified_base 198: mod_base = OTHER; note = N1-methylpseudouracil
  modified_base 202: mod_base = OTHER; note = N1-methylpseudouracil
  modified_base 205: mod_base = OTHER; note = N1-methylpseudouracil
  modified_base 207: mod_base = OTHER; note = N1-methylpseudouracil
  modified_base 220: mod_base = OTHER; note = N1-methylpseudouracil
  modified_base 221: mod_base = OTHER; note = N1-methylpseudouracil
  modified_base 239: mod_base = OTHER; note = N1-methylpseudouracil
  modified_base 250: mod_base = OTHER; note = N1-methylpseudouracil
  modified_base 261: mod_base = OTHER; note = N1-methylpseudouracil
  modified_base 267: mod_base = OTHER; note = N1-methylpseudouracil
  modified_base 269: mod_base = OTHER; note = N1-methylpseudouracil
  modified_base 272: mod_base = OTHER; note = N1-methylpseudouracil
  modified_base 283: mod_base = OTHER; note = N1-methylpseudouracil
  modified_base 290: mod_base = OTHER; note = N1-methylpseudouracil
  modified_base 294: mod_base = OTHER; note = N1-methylpseudouracil
  modified_base 295: mod_base = OTHER; note = N1-methylpseudouracil
  modified_base 296: mod_base = OTHER; note = N1-methylpseudouracil
  modified_base 299: mod_base = OTHER; note = N1-methylpseudouracil
  modified_base 306: mod_base = OTHER; note = N1-methylpseudouracil
  modified_base 311: mod_base = OTHER; note = N1-methylpseudouracil
  modified_base 320: mod_base = OTHER; note = N1-methylpseudouracil
  modified_base 326: mod_base = OTHER; note = N1-methylpseudouracil
  modified_base 327: mod_base = OTHER; note = N1-methylpseudouracil
  modified_base 329: mod_base = OTHER; note = N1-methylpseudouracil
  modified_base 342: mod_base = OTHER; note = N1-methylpseudouracil
  modified_base 344: mod_base = OTHER; note = N1-methylpseudouracil
  modified_base 350: mod_base = OTHER; note = N1-methylpseudouracil
  modified_base 367: mod_base = OTHER; note = N1-methylpseudouracil
  modified_base 369: mod_base = OTHER; note = N1-methylpseudouracil
  modified_base 370: mod_base = OTHER; note = N1-methylpseudouracil
  modified_base 372: mod_base = OTHER; note = N1-methylpseudouracil
  modified_base 377: mod_base = OTHER; note = N1-methylpseudouracil
  modified_base 380: mod_base = OTHER; note = N1-methylpseudouracil
  modified_base 386: mod_base = OTHER; note = N1-methylpseudouracil
  modified_base 393: mod_base = OTHER; note = N1-methylpseudouracil
  modified_base 401: mod_base = OTHER; note = N1-methylpseudouracil
  modified_base 404: mod_base = OTHER; note = N1-methylpseudouracil
  modified_base 405: mod_base = OTHER; note = N1-methylpseudouracil
  modified_base 407: mod_base = OTHER; note = N1-methylpseudouracil
  modified_base 413: mod_base = OTHER; note = N1-methylpseudouracil
  modified_base 429: mod_base = OTHER; note = N1-methylpseudouracil
  modified_base 437: mod_base = OTHER; note = N1-methylpseudouracil
  modified_base 443: mod_base = OTHER; note = N1-methylpseudouracil
  modified_base 449: mod_base = OTHER; note = N1-methylpseudouracil
  modified_base 459: mod_base = OTHER; note = N1-methylpseudouracil
  modified_base 466: mod_base = OTHER; note = N1-methylpseudouracil
  modified_base 473: mod_base = OTHER; note = N1-methylpseudouracil
  modified_base 479: mod_base = OTHER; note = N1-methylpseudouracil
  modified_base 481: mod_base = OTHER; note = N1-methylpseudouracil
  modified_base 484: mod_base = OTHER; note = N1-methylpseudouracil
  modified_base 488: mod_base = OTHER; note = N1-methylpseudouracil
  modified_base 491: mod_base = OTHER; note = N1-methylpseudouracil
  modified_base 495: mod_base = OTHER; note = N1-methylpseudouracil
  modified_base 497: mod_base = OTHER; note = N1-methylpseudouracil
  modified_base 499: mod_base = OTHER; note = N1-methylpseudouracil
  modified_base 509: mod_base = OTHER; note = N1-methylpseudouracil
  modified_base 519: mod_base = OTHER; note = N1-methylpseudouracil
  modified_base 521: mod_base = OTHER; note = N1-methylpseudouracil
  modified_base 530: mod_base = OTHER; note = N1-methylpseudouracil
  modified_base 531: mod_base = OTHER; note = N1-methylpseudouracil
  modified_base 539: mod_base = OTHER; note = N1-methylpseudouracil
  modified_base 551: mod_base = OTHER; note = N1-methylpseudouracil
  modified_base 553: mod_base = OTHER; note = N1-methylpseudouracil
  modified_base 555: mod_base = OTHER; note = N1-methylpseudouracil
  modified_base 563: mod_base = OTHER; note = N1-methylpseudouracil
  modified_base 565: mod_base = OTHER; note = N1-methylpseudouracil
  modified_base 572: mod_base = OTHER; note = N1-methylpseudouracil
  modified_base 583: mod_base = OTHER; note = N1-methylpseudouracil
  modified_base 584: mod_base = OTHER; note = N1-methylpseudouracil
  modified_base 590: mod_base = OTHER; note = N1-methylpseudouracil
  modified_base 595: mod_base = OTHER; note = N1-methylpseudouracil
  modified_base 596: mod_base = OTHER; note = N1-methylpseudouracil
  modified_base 604: mod_base = OTHER; note = N1-methylpseudouracil
  modified_base 605: mod_base = OTHER; note = N1-methylpseudouracil
  modified_base 606: mod_base = OTHER; note = N1-methylpseudouracil
  modified_base 608: mod_base = OTHER; note = N1-methylpseudouracil
  modified_base 618: mod_base = OTHER; note = N1-methylpseudouracil
  modified_base 620: mod_base = OTHER; note = N1-methylpseudouracil
  modified_base 622: mod_base = OTHER; note = N1-methylpseudouracil
  modified_base 624: mod_base = OTHER; note = N1-methylpseudouracil
  modified_base 627: mod_base = OTHER; note = N1-methylpseudouracil
  modified_base 628: mod_base = OTHER; note = N1-methylpseudouracil
  modified_base 629: mod_base = OTHER; note = N1-methylpseudouracil
  modified_base 632: mod_base = OTHER; note = N1-methylpseudouracil
  modified_base 653: mod_base = OTHER; note = N1-methylpseudouracil
  modified_base 664: mod_base = OTHER; note = N1-methylpseudouracil
  modified_base 666: mod_base = OTHER; note = N1-methylpseudouracil
  modified_base 674: mod_base = OTHER; note = N1-methylpseudouracil
  modified_base 679: mod_base = OTHER; note = N1-methylpseudouracil
  modified_base 682: mod_base = OTHER; note = N1-methylpseudouracil
  modified_base 683: mod_base = OTHER; note = N1-methylpseudouracil
  modified_base 685: mod_base = OTHER; note = N1-methylpseudouracil
  modified_base 689: mod_base = OTHER; note = N1-methylpseudouracil
  modified_base 693: mod_base = OTHER; note = N1-methylpseudouracil
  modified_base 697: mod_base = OTHER; note = N1-methylpseudouracil
  modified_base 698: mod_base = OTHER; note = N1-methylpseudouracil
  modified_base 703: mod_base = OTHER; note = N1-methylpseudouracil
  modified_base 704: mod_base = OTHER; note = N1-methylpseudouracil
  modified_base 713: mod_base = OTHER; note = N1-methylpseudouracil
  modified_base 714: mod_base = OTHER; note = N1-methylpseudouracil
  modified_base 716: mod_base = OTHER; note = N1-methylpseudouracil
  modified_base 720: mod_base = OTHER; note = N1-methylpseudouracil
  modified_base 722: mod_base = OTHER; note = N1-methylpseudouracil
  modified_base 742: mod_base = OTHER; note = N1-methylpseudouracil
  modified_base 743: mod_base = OTHER; note = N1-methylpseudouracil
  modified_base 744: mod_base = OTHER; note = N1-methylpseudouracil
  modified_base 752: mod_base = OTHER; note = N1-methylpseudouracil
  modified_base 755: mod_base = OTHER; note = N1-methylpseudouracil
  modified_base 762: mod_base = OTHER; note = N1-methylpseudouracil
  modified_base 770: mod_base = OTHER; note = N1-methylpseudouracil
  modified_base 782: mod_base = OTHER; note = N1-methylpseudouracil
  modified_base 783: mod_base = OTHER; note = N1-methylpseudouracil
  modified_base 786: mod_base = OTHER; note = N1-methylpseudouracil
  modified_base 789: mod_base = OTHER; note = N1-methylpseudouracil
  modified_base 792: mod_base = OTHER; note = N1-methylpseudouracil
  modified_base 802: mod_base = OTHER; note = N1-methylpseudouracil
  modified_base 803: mod_base = OTHER; note = N1-methylpseudouracil
  modified_base 812: mod_base = OTHER; note = N1-methylpseudouracil
  modified_base 815: mod_base = OTHER; note = N1-methylpseudouracil
  modified_base 822: mod_base = OTHER; note = N1-methylpseudouracil
  modified_base 827: mod_base = OTHER; note = N1-methylpseudouracil
  modified_base 829: mod_base = OTHER; note = N1-methylpseudouracil
  modified_base 842: mod_base = OTHER; note = N1-methylpseudouracil
  modified_base 847: mod_base = OTHER; note = N1-methylpseudouracil
  modified_base 863: mod_base = OTHER; note = N1-methylpseudouracil
  modified_base 869: mod_base = OTHER; note = N1-methylpseudouracil
  modified_base 872: mod_base = OTHER; note = N1-methylpseudouracil
  modified_base 875: mod_base = OTHER; note = N1-methylpseudouracil
  modified_base 877: mod_base = OTHER; note = N1-methylpseudouracil
  modified_base 878: mod_base = OTHER; note = N1-methylpseudouracil
  modified_base 881: mod_base = OTHER; note = N1-methylpseudouracil
  modified_base 901: mod_base = OTHER; note = N1-methylpseudouracil
  modified_base 902: mod_base = OTHER; note = N1-methylpseudouracil
  modified_base 903: mod_base = OTHER; note = N1-methylpseudouracil
  modified_base 908: mod_base = OTHER; note = N1-methylpseudouracil
  modified_base 913: mod_base = OTHER; note = N1-methylpseudouracil
  modified_base 920: mod_base = OTHER; note = N1-methylpseudouracil
  modified_base 929: mod_base = OTHER; note = N1-methylpseudouracil
  modified_base 932: mod_base = OTHER; note = N1-methylpseudouracil
  modified_base 935: mod_base = OTHER; note = N1-methylpseudouracil
  modified_base 950: mod_base = OTHER; note = N1-methylpseudouracil
  modified_base 952: mod_base = OTHER; note = N1-methylpseudouracil
  modified_base 954: mod_base = OTHER; note = N1-methylpseudouracil
  modified_base 959: mod_base = OTHER; note = N1-methylpseudouracil
  modified_base 963: mod_base = OTHER; note = N1-methylpseudouracil
  modified_base 964: mod_base = OTHER; note = N1-methylpseudouracil
  modified_base 976: mod_base = OTHER; note = N1-methylpseudouracil
  modified_base 983: mod_base = OTHER; note = N1-methylpseudouracil
  modified_base 992: mod_base = OTHER; note = N1-methylpseudouracil
  modified_base 995: mod_base = OTHER; note = N1-methylpseudouracil
  modified_base 1000: mod_base = OTHER; note = N1-methylpseudouracil
  modified_base 1010: mod_base = OTHER; note = N1-methylpseudouracil
  modified_base 1011: mod_base = OTHER; note = N1-methylpseudouracil
  modified_base 1019: mod_base = OTHER; note = N1-methylpseudouracil
  modified_base 1022: mod_base = OTHER; note = N1-methylpseudouracil
  modified_base 1023: mod_base = OTHER; note = N1-methylpseudouracil
  modified_base 1026: mod_base = OTHER; note = N1-methylpseudouracil
  modified_base 1031: mod_base = OTHER; note = N1-methylpseudouracil
  modified_base 1034: mod_base = OTHER; note = N1-methylpseudouracil
  modified_base 1046: mod_base = OTHER; note = N1-methylpseudouracil
  modified_base 1049: mod_base = OTHER; note = N1-methylpseudouracil
  modified_base 1052: mod_base = OTHER; note = N1-methylpseudouracil
  modified_base 1055: mod_base = OTHER; note = N1-methylpseudouracil
  modified_base 1057: mod_base = OTHER; note = N1-methylpseudouracil
  modified_base 1058: mod_base = OTHER; note = N1-methylpseudouracil
  modified_base 1059: mod_base = OTHER; note = N1-methylpseudouracil
  modified_base 1064: mod_base = OTHER; note = N1-methylpseudouracil
  modified_base 1079: mod_base = OTHER; note = N1-methylpseudouracil
  modified_base 1085: mod_base = OTHER; note = N1-methylpseudouracil
  modified_base 1087: mod_base = OTHER; note = N1-methylpseudouracil
  modified_base 1095: mod_base = OTHER; note = N1-methylpseudouracil
  modified_base 1096: mod_base = OTHER; note = N1-methylpseudouracil
  modified_base 1106: mod_base = OTHER; note = N1-methylpseudouracil
  modified_base 1109: mod_base = OTHER; note = N1-methylpseudouracil
  modified_base 1122: mod_base = OTHER; note = N1-methylpseudouracil
  modified_base 1124: mod_base = OTHER; note = N1-methylpseudouracil
  modified_base 1130: mod_base = OTHER; note = N1-methylpseudouracil
  modified_base 1133: mod_base = OTHER; note = N1-methylpseudouracil
  modified_base 1144: mod_base = OTHER; note = N1-methylpseudouracil
  modified_base 1154: mod_base = OTHER; note = N1-methylpseudouracil
  modified_base 1157: mod_base = OTHER; note = N1-methylpseudouracil
  modified_base 1163: mod_base = OTHER; note = N1-methylpseudouracil
  modified_base 1166: mod_base = OTHER; note = N1-methylpseudouracil
  modified_base 1169: mod_base = OTHER; note = N1-methylpseudouracil
  modified_base 1171: mod_base = OTHER; note = N1-methylpseudouracil
  modified_base 1177: mod_base = OTHER; note = N1-methylpseudouracil
  modified_base 1187: mod_base = OTHER; note = N1-methylpseudouracil
  modified_base 1199: mod_base = OTHER; note = N1-methylpseudouracil
  modified_base 1205: mod_base = OTHER; note = N1-methylpseudouracil
  modified_base 1211: mod_base = OTHER; note = N1-methylpseudouracil
  modified_base 1214: mod_base = OTHER; note = N1-methylpseudouracil
  modified_base 1232: mod_base = OTHER; note = N1-methylpseudouracil
  modified_base 1238: mod_base = OTHER; note = N1-methylpseudouracil
  modified_base 1243: mod_base = OTHER; note = N1-methylpseudouracil
  modified_base 1244: mod_base = OTHER; note = N1-methylpseudouracil
  modified_base 1245: mod_base = OTHER; note = N1-methylpseudouracil
  modified_base 1253: mod_base = OTHER; note = N1-methylpseudouracil
  modified_base 1255: mod_base = OTHER; note = N1-methylpseudouracil
  modified_base 1257: mod_base = OTHER; note = N1-methylpseudouracil
  modified_base 1269: mod_base = OTHER; note = N1-methylpseudouracil
  modified_base 1271: mod_base = OTHER; note = N1-methylpseudouracil
  modified_base 1273: mod_base = OTHER; note = N1-methylpseudouracil
  modified_base 1274: mod_base = OTHER; note = N1-methylpseudouracil
  modified_base 1291: mod_base = OTHER; note = N1-methylpseudouracil
  modified_base 1294: mod_base = OTHER; note = N1-methylpseudouracil
  modified_base 1296: mod_base = OTHER; note = N1-methylpseudouracil
  modified_base 1301: mod_base = OTHER; note = N1-methylpseudouracil
  modified_base 1307: mod_base = OTHER; note = N1-methylpseudouracil
  modified_base 1321: mod_base = OTHER; note = N1-methylpseudouracil
  modified_base 1324: mod_base = OTHER; note = N1-methylpseudouracil
  modified_base 1325: mod_base = OTHER; note = N1-methylpseudouracil
  modified_base 1331: mod_base = OTHER; note = N1-methylpseudouracil
  modified_base 1337: mod_base = OTHER; note = N1-methylpseudouracil
  modified_base 1343: mod_base = OTHER; note = N1-methylpseudouracil
  modified_base 1347: mod_base = OTHER; note = N1-methylpseudouracil
  modified_base 1351: mod_base = OTHER; note = N1-methylpseudouracil
  modified_base 1353: mod_base = OTHER; note = N1-methylpseudouracil
  modified_base 1373: mod_base = OTHER; note = N1-methylpseudouracil
  modified_base 1376: mod_base = OTHER; note = N1-methylpseudouracil
  modified_base 1379: mod_base = OTHER; note = N1-methylpseudouracil
  modified_base 1388: mod_base = OTHER; note = N1-methylpseudouracil
  modified_base 1394: mod_base = OTHER; note = N1-methylpseudouracil
  modified_base 1406: mod_base = OTHER; note = N1-methylpseudouracil
  modified_base 1412: mod_base = OTHER; note = N1-methylpseudouracil
  modified_base 1415: mod_base = OTHER; note = N1-methylpseudouracil
  modified_base 1418: mod_base = OTHER; note = N1-methylpseudouracil
  modified_base 1420: mod_base = OTHER; note = N1-methylpseudouracil
  modified_base 1425: mod_base = OTHER; note = N1-methylpseudouracil
  modified_base 1429: mod_base = OTHER; note = N1-methylpseudouracil
  modified_base 1431: mod_base = OTHER; note = N1-methylpseudouracil
  modified_base 1435: mod_base = OTHER; note = N1-methylpseudouracil
  modified_base 1441: mod_base = OTHER; note = N1-methylpseudouracil
  modified_base 1454: mod_base = OTHER; note = N1-methylpseudouracil
  modified_base 1460: mod_base = OTHER; note = N1-methylpseudouracil
  modified_base 1468: mod_base = OTHER; note = N1-methylpseudouracil
  modified_base 1470: mod_base = OTHER; note = N1-methylpseudouracil
  modified_base 1474: mod_base = OTHER; note = N1-methylpseudouracil
  modified_base 1495: mod_base = OTHER; note = N1-methylpseudouracil
  modified_base 1496: mod_base = OTHER; note = N1-methylpseudouracil
  modified_base 1501: mod_base = OTHER; note = N1-methylpseudouracil
  modified_base 1508: mod_base = OTHER; note = N1-methylpseudouracil
  modified_base 1510: mod_base = OTHER; note = N1-methylpseudouracil
  modified_base 1516: mod_base = OTHER; note = N1-methylpseudouracil
  modified_base 1532: mod_base = OTHER; note = N1-methylpseudouracil
  modified_base 1539: mod_base = OTHER; note = N1-methylpseudouracil
  modified_base 1543: mod_base = OTHER; note = N1-methylpseudouracil
  modified_base 1549: mod_base = OTHER; note = N1-methylpseudouracil
  modified_base 1562: mod_base = OTHER; note = N1-methylpseudouracil
  modified_base 1565: mod_base = OTHER; note = N1-methylpseudouracil
  modified_base 1567: mod_base = OTHER; note = N1-methylpseudouracil
  modified_base 1569: mod_base = OTHER; note = N1-methylpseudouracil
  modified_base 1579: mod_base = OTHER; note = N1-methylpseudouracil
  modified_base 1593: mod_base = OTHER; note = N1-methylpseudouracil
  modified_base 1602: mod_base = OTHER; note = N1-methylpseudouracil
  modified_base 1606: mod_base = OTHER; note = N1-methylpseudouracil
  modified_base 1609: mod_base = OTHER; note = N1-methylpseudouracil
  modified_base 1611: mod_base = OTHER; note = N1-methylpseudouracil
  modified_base 1624: mod_base = OTHER; note = N1-methylpseudouracil
  modified_base 1627: mod_base = OTHER; note = N1-methylpseudouracil
  modified_base 1630: mod_base = OTHER; note = N1-methylpseudouracil
  modified_base 1639: mod_base = OTHER; note = N1-methylpseudouracil
  modified_base 1643: mod_base = OTHER; note = N1-methylpseudouracil
  modified_base 1645: mod_base = OTHER; note = N1-methylpseudouracil
  modified_base 1652: mod_base = OTHER; note = N1-methylpseudouracil
  modified_base 1654: mod_base = OTHER; note = N1-methylpseudouracil
  modified_base 1659: mod_base = OTHER; note = N1-methylpseudouracil
  modified_base 1660: mod_base = OTHER; note = N1-methylpseudouracil
  modified_base 1670: mod_base = OTHER; note = N1-methylpseudouracil
  modified_base 1671: mod_base = OTHER; note = N1-methylpseudouracil
  modified_base 1672: mod_base = OTHER; note = N1-methylpseudouracil
  modified_base 1681: mod_base = OTHER; note = N1-methylpseudouracil
  modified_base 1684: mod_base = OTHER; note = N1-methylpseudouracil
  modified_base 1690: mod_base = OTHER; note = N1-methylpseudouracil
  modified_base 1692: mod_base = OTHER; note = N1-methylpseudouracil
  modified_base 1695: mod_base = OTHER; note = N1-methylpseudouracil
  modified_base 1699: mod_base = OTHER; note = N1-methylpseudouracil
  modified_base 1700: mod_base = OTHER; note = N1-methylpseudouracil
  modified_base 1701: mod_base = OTHER; note = N1-methylpseudouracil
  modified_base 1702: mod_base = OTHER; note = N1-methylpseudouracil
  modified_base 1705: mod_base = OTHER; note = N1-methylpseudouracil
  modified_base 1709: mod_base = OTHER; note = N1-methylpseudouracil
  modified_base 1724: mod_base = OTHER; note = N1-methylpseudouracil
  modified_base 1727: mod_base = OTHER; note = N1-methylpseudouracil
  modified_base 1729: mod_base = OTHER; note = N1-methylpseudouracil
  modified_base 1740: mod_base = OTHER; note = N1-methylpseudouracil
  modified_base 1747: mod_base = OTHER; note = N1-methylpseudouracil
  modified_base 1753: mod_base = OTHER; note = N1-methylpseudouracil
  modified_base 1762: mod_base = OTHER; note = N1-methylpseudouracil
  modified_base 1766: mod_base = OTHER; note = N1-methylpseudouracil
  modified_base 1768: mod_base = OTHER; note = N1-methylpseudouracil
  modified_base 1770: mod_base = OTHER; note = N1-methylpseudouracil
  modified_base 1780: mod_base = OTHER; note = N1-methylpseudouracil
  modified_base 1792: mod_base = OTHER; note = N1-methylpseudouracil
  modified_base 1795: mod_base = OTHER; note = N1-methylpseudouracil
  modified_base 1801: mod_base = OTHER; note = N1-methylpseudouracil
  modified_base 1806: mod_base = OTHER; note = N1-methylpseudouracil
  modified_base 1809: mod_base = OTHER; note = N1-methylpseudouracil
  modified_base 1810: mod_base = OTHER; note = N1-methylpseudouracil
  modified_base 1815: mod_base = OTHER; note = N1-methylpseudouracil
  modified_base 1822: mod_base = OTHER; note = N1-methylpseudouracil
  modified_base 1824: mod_base = OTHER; note = N1-methylpseudouracil
  modified_base 1826: mod_base = OTHER; note = N1-methylpseudouracil
  modified_base 1841: mod_base = OTHER; note = N1-methylpseudouracil
  modified_base 1844: mod_base = OTHER; note = N1-methylpseudouracil
  modified_base 1846: mod_base = OTHER; note = N1-methylpseudouracil
  modified_base 1848: mod_base = OTHER; note = N1-methylpseudouracil
  modified_base 1849: mod_base = OTHER; note = N1-methylpseudouracil
  modified_base 1851: mod_base = OTHER; note = N1-methylpseudouracil
  modified_base 1864: mod_base = OTHER; note = N1-methylpseudouracil
  modified_base 1868: mod_base = OTHER; note = N1-methylpseudouracil
  modified_base 1870: mod_base = OTHER; note = N1-methylpseudouracil
  modified_base 1879: mod_base = OTHER; note = N1-methylpseudouracil
  modified_base 1883: mod_base = OTHER; note = N1-methylpseudouracil
  modified_base 1885: mod_base = OTHER; note = N1-methylpseudouracil
  modified_base 1890: mod_base = OTHER; note = N1-methylpseudouracil
  modified_base 1893: mod_base = OTHER; note = N1-methylpseudouracil
  modified_base 1903: mod_base = OTHER; note = N1-methylpseudouracil
  modified_base 1915: mod_base = OTHER; note = N1-methylpseudouracil
  modified_base 1924: mod_base = OTHER; note = N1-methylpseudouracil
  modified_base 1926: mod_base = OTHER; note = N1-methylpseudouracil
  modified_base 1933: mod_base = OTHER; note = N1-methylpseudouracil
  modified_base 1944: mod_base = OTHER; note = N1-methylpseudouracil
  modified_base 1945: mod_base = OTHER; note = N1-methylpseudouracil
  modified_base 1960: mod_base = OTHER; note = N1-methylpseudouracil
  modified_base 1963: mod_base = OTHER; note = N1-methylpseudouracil
  modified_base 1967: mod_base = OTHER; note = N1-methylpseudouracil
  modified_base 1972: mod_base = OTHER; note = N1-methylpseudouracil
  modified_base 1979: mod_base = OTHER; note = N1-methylpseudouracil
  modified_base 1981: mod_base = OTHER; note = N1-methylpseudouracil
  modified_base 2008: mod_base = OTHER; note = N1-methylpseudouracil
  modified_base 2012: mod_base = OTHER; note = N1-methylpseudouracil
  modified_base 2016: mod_base = OTHER; note = N1-methylpseudouracil
  modified_base 2020: mod_base = OTHER; note = N1-methylpseudouracil
  modified_base 2022: mod_base = OTHER; note = N1-methylpseudouracil
  modified_base 2027: mod_base = OTHER; note = N1-methylpseudouracil
  modified_base 2037: mod_base = OTHER; note = N1-methylpseudouracil
  modified_base 2042: mod_base = OTHER; note = N1-methylpseudouracil
  modified_base 2043: mod_base = OTHER; note = N1-methylpseudouracil
  modified_base 2059: mod_base = OTHER; note = N1-methylpseudouracil
  modified_base 2060: mod_base = OTHER; note = N1-methylpseudouracil
  modified_base 2062: mod_base = OTHER; note = N1-methylpseudouracil
  modified_base 2078: mod_base = OTHER; note = N1-methylpseudouracil
  modified_base 2083: mod_base = OTHER; note = N1-methylpseudouracil
  modified_base 2086: mod_base = OTHER; note = N1-methylpseudouracil
  modified_base 2090: mod_base = OTHER; note = N1-methylpseudouracil
  modified_base 2107: mod_base = OTHER; note = N1-methylpseudouracil
  modified_base 2111: mod_base = OTHER; note = N1-methylpseudouracil
  modified_base 2114: mod_base = OTHER; note = N1-methylpseudouracil
  modified_base 2118: mod_base = OTHER; note = N1-methylpseudouracil
  modified_base 2119: mod_base = OTHER; note = N1-methylpseudouracil
  modified_base 2120: mod_base = OTHER; note = N1-methylpseudouracil
  modified_base 2123: mod_base = OTHER; note = N1-methylpseudouracil
  modified_base 2126: mod_base = OTHER; note = N1-methylpseudouracil
  modified_base 2133: mod_base = OTHER; note = N1-methylpseudouracil
  modified_base 2136: mod_base = OTHER; note = N1-methylpseudouracil
  modified_base 2153: mod_base = OTHER; note = N1-methylpseudouracil
  modified_base 2156: mod_base = OTHER; note = N1-methylpseudouracil
  modified_base 2157: mod_base = OTHER; note = N1-methylpseudouracil
  modified_base 2161: mod_base = OTHER; note = N1-methylpseudouracil
  modified_base 2163: mod_base = OTHER; note = N1-methylpseudouracil
  modified_base 2165: mod_base = OTHER; note = N1-methylpseudouracil
  modified_base 2178: mod_base = OTHER; note = N1-methylpseudouracil
  modified_base 2179: mod_base = OTHER; note = N1-methylpseudouracil
  modified_base 2181: mod_base = OTHER; note = N1-methylpseudouracil
  modified_base 2198: mod_base = OTHER; note = N1-methylpseudouracil
  modified_base 2199: mod_base = OTHER; note = N1-methylpseudouracil
  modified_base 2204: mod_base = OTHER; note = N1-methylpseudouracil
  modified_base 2207: mod_base = OTHER; note = N1-methylpseudouracil
  modified_base 2210: mod_base = OTHER; note = N1-methylpseudouracil
  modified_base 2213: mod_base = OTHER; note = N1-methylpseudouracil
  modified_base 2219: mod_base = OTHER; note = N1-methylpseudouracil
  modified_base 2221: mod_base = OTHER; note = N1-methylpseudouracil
  modified_base 2225: mod_base = OTHER; note = N1-methylpseudouracil
  modified_base 2231: mod_base = OTHER; note = N1-methylpseudouracil
  modified_base 2234: mod_base = OTHER; note = N1-methylpseudouracil
  modified_base 2237: mod_base = OTHER; note = N1-methylpseudouracil
  modified_base 2240: mod_base = OTHER; note = N1-methylpseudouracil
  modified_base 2246: mod_base = OTHER; note = N1-methylpseudouracil
  modified_base 2249: mod_base = OTHER; note = N1-methylpseudouracil
  modified_base 2252: mod_base = OTHER; note = N1-methylpseudouracil
  modified_base 2255: mod_base = OTHER; note = N1-methylpseudouracil
  modified_base 2257: mod_base = OTHER; note = N1-methylpseudouracil
  modified_base 2261: mod_base = OTHER; note = N1-methylpseudouracil
  modified_base 2263: mod_base = OTHER; note = N1-methylpseudouracil
  modified_base 2270: mod_base = OTHER; note = N1-methylpseudouracil
  modified_base 2273: mod_base = OTHER; note = N1-methylpseudouracil
  modified_base 2276: mod_base = OTHER; note = N1-methylpseudouracil
  modified_base 2278: mod_base = OTHER; note = N1-methylpseudouracil
  modified_base 2281: mod_base = OTHER; note = N1-methylpseudouracil
  modified_base 2282: mod_base = OTHER; note = N1-methylpseudouracil
  modified_base 2300: mod_base = OTHER; note = N1-methylpseudouracil
  modified_base 2308: mod_base = OTHER; note = N1-methylpseudouracil
  modified_base 2309: mod_base = OTHER; note = N1-methylpseudouracil
  modified_base 2310: mod_base = OTHER; note = N1-methylpseudouracil
  modified_base 2323: mod_base = OTHER; note = N1-methylpseudouracil
  modified_base 2325: mod_base = OTHER; note = N1-methylpseudouracil
  modified_base 2335: mod_base = OTHER; note = N1-methylpseudouracil
  modified_base 2352: mod_base = OTHER; note = N1-methylpseudouracil
  modified_base 2355: mod_base = OTHER; note = N1-methylpseudouracil
  modified_base 2357: mod_base = OTHER; note = N1-methylpseudouracil
  modified_base 2359: mod_base = OTHER; note = N1-methylpseudouracil
  modified_base 2368: mod_base = OTHER; note = N1-methylpseudouracil
  modified_base 2370: mod_base = OTHER; note = N1-methylpseudouracil
  modified_base 2373: mod_base = OTHER; note = N1-methylpseudouracil
  modified_base 2374: mod_base = OTHER; note = N1-methylpseudouracil
  modified_base 2376: mod_base = OTHER; note = N1-methylpseudouracil
  modified_base 2380: mod_base = OTHER; note = N1-methylpseudouracil
  modified_base 2381: mod_base = OTHER; note = N1-methylpseudouracil
  modified_base 2390: mod_base = OTHER; note = N1-methylpseudouracil
  modified_base 2394: mod_base = OTHER; note = N1-methylpseudouracil
  modified_base 2395: mod_base = OTHER; note = N1-methylpseudouracil
  modified_base 2420: mod_base = OTHER; note = N1-methylpseudouracil
  modified_base 2426: mod_base = OTHER; note = N1-methylpseudouracil
  modified_base 2428: mod_base = OTHER; note = N1-methylpseudouracil
  modified_base 2436: mod_base = OTHER; note = N1-methylpseudouracil
  modified_base 2437: mod_base = OTHER; note = N1-methylpseudouracil
  modified_base 2450: mod_base = OTHER; note = N1-methylpseudouracil
  modified_base 2457: mod_base = OTHER; note = N1-methylpseudouracil
  modified_base 2462: mod_base = OTHER; note = N1-methylpseudouracil
  modified_base 2465: mod_base = OTHER; note = N1-methylpseudouracil
  modified_base 2471: mod_base = OTHER; note = N1-methylpseudouracil
  modified_base 2482: mod_base = OTHER; note = N1-methylpseudouracil
  modified_base 2490: mod_base = OTHER; note = N1-methylpseudouracil
  modified_base 2500: mod_base = OTHER; note = N1-methylpseudouracil
  modified_base 2504: mod_base = OTHER; note = N1-methylpseudouracil
  modified_base 2509: mod_base = OTHER; note = N1-methylpseudouracil
  modified_base 2513: mod_base = OTHER; note = N1-methylpseudouracil
  modified_base 2514: mod_base = OTHER; note = N1-methylpseudouracil
  modified_base 2516: mod_base = OTHER; note = N1-methylpseudouracil
  modified_base 2517: mod_base = OTHER; note = N1-methylpseudouracil
  modified_base 2523: mod_base = OTHER; note = N1-methylpseudouracil
  modified_base 2524: mod_base = OTHER; note = N1-methylpseudouracil
  modified_base 2530: mod_base = OTHER; note = N1-methylpseudouracil
  modified_base 2543: mod_base = OTHER; note = N1-methylpseudouracil
  modified_base 2546: mod_base = OTHER; note = N1-methylpseudouracil
  modified_base 2551: mod_base = OTHER; note = N1-methylpseudouracil
  modified_base 2552: mod_base = OTHER; note = N1-methylpseudouracil
  modified_base 2555: mod_base = OTHER; note = N1-methylpseudouracil
  modified_base 2563: mod_base = OTHER; note = N1-methylpseudouracil
  modified_base 2579: mod_base = OTHER; note = N1-methylpseudouracil
  modified_base 2580: mod_base = OTHER; note = N1-methylpseudouracil
  modified_base 2582: mod_base = OTHER; note = N1-methylpseudouracil
  modified_base 2588: mod_base = OTHER; note = N1-methylpseudouracil
  modified_base 2593: mod_base = OTHER; note = N1-methylpseudouracil
  modified_base 2596: mod_base = OTHER; note = N1-methylpseudouracil
  modified_base 2598: mod_base = OTHER; note = N1-methylpseudouracil
  modified_base 2599: mod_base = OTHER; note = N1-methylpseudouracil
  modified_base 2600: mod_base = OTHER; note = N1-methylpseudouracil
  modified_base 2604: mod_base = OTHER; note = N1-methylpseudouracil
  modified_base 2609: mod_base = OTHER; note = N1-methylpseudouracil
  modified_base 2611: mod_base = OTHER; note = N1-methylpseudouracil
  modified_base 2615: mod_base = OTHER; note = N1-methylpseudouracil

SEQ ID NO: 169 - RNA, 2622 nt, unidentified
  source 1..2622: mol_type = unassigned RNA
  modified_base 6: mod_base = OTHER; note = N1-methylpseudouracil
  modified_base 14: mod_base = OTHER; note = N1-methylpseudouracil
  modified_base 15: mod_base = OTHER; note = N1-methylpseudouracil
  modified_base 16: mod_base = OTHER; note = N1-methylpseudouracil
  modified_base 19: mod_base = OTHER; note = N1-methylpseudouracil
  modified_base 21: mod_base = OTHER; note = N1-methylpseudouracil
  modified_base 22: mod_base = OTHER; note = N1-methylpseudouracil
  modified_base 27: mod_base = OTHER; note = N1-methylpseudouracil
  modified_base 28: mod_base = OTHER; note = N1-methylpseudouracil
  modified_base 32: mod_base = OTHER; note = N1-methylpseudouracil
  modified_base 33: mod_base = OTHER; note = N1-methylpseudouracil
  modified_base 34: mod_base = OTHER; note = N1-methylpseudouracil
  modified_base 36: mod_base = OTHER; note = N1-methylpseudouracil
  modified_base 37: mod_base = OTHER; note = N1-methylpseudouracil
  modified_base 38: mod_base = OTHER; note = N1-methylpseudouracil
  modified_base 39: mod_base = OTHER; note = N1-methylpseudouracil
  modified_base 42: mod_base = OTHER; note = N1-methylpseudouracil
  modified_base 43: mod_base = OTHER; note = N1-methylpseudouracil
  modified_base 44: mod_base = OTHER; note = N1-methylpseudouracil
  modified_base 45: mod_base = OTHER; note = N1-methylpseudouracil
  modified_base 47: mod_base = OTHER; note = N1-methylpseudouracil
  modified_base 54: mod_base = OTHER; note = N1-methylpseudouracil
  modified_base 62: mod_base = OTHER; note = N1-methylpseudouracil
  modified_base 63: mod_base = OTHER; note = N1-methylpseudouracil
  modified_base 64: mod_base = OTHER; note = N1-methylpseudouracil
  modified_base 65: mod_base = OTHER; note = N1-methylpseudouracil
  modified_base 66: mod_base = OTHER; note = N1-methylpseudouracil
  modified_base 68: mod_base = OTHER; note = N1-methylpseudouracil
  modified_base 69: mod_base = OTHER; note = N1-methylpseudouracil
  modified_base 71: mod_base = OTHER; note = N1-methylpseudouracil
  modified_base 77: mod_base = OTHER; note = N1-methylpseudouracil
  modified_base 83: mod_base = OTHER; note = N1-methylpseudouracil
  modified_base 89: mod_base = OTHER; note = N1-methylpseudouracil
  modified_base 92: mod_base = OTHER; note = N1-methylpseudouracil
  modified_base 94: mod_base = OTHER; note = N1-methylpseudouracil
  modified_base 98: mod_base = OTHER; note = N1-methylpseudouracil
  modified_base 100: mod_base = OTHER; note = N1-methylpseudouracil
  modified_base 101: mod_base = OTHER; note = N1-methylpseudouracil
  modified_base 103: mod_base = OTHER; note = N1-methylpseudouracil
  modified_base 104: mod_base = OTHER; note = N1-methylpseudouracil
  modified_base 107: mod_base = OTHER; note = N1-methylpseudouracil
  modified_base 109: mod_base = OTHER; note = N1-methylpseudouracil
  modified_base 110: mod_base = OTHER; note = N1-methylpseudouracil
  modified_base 113: mod_base = OTHER; note = N1-methylpseudouracil
  modified_base 131: mod_base = OTHER; note = N1-methylpseudouracil
  modified_base 138: mod_base = OTHER; note = N1-methylpseudouracil
  modified_base 142: mod_base = OTHER; note = N1-methylpseudouracil
  modified_base 149: mod_base = OTHER; note = N1-methylpseudouracil
  modified_base 150: mod_base = OTHER; note = N1-methylpseudouracil
  modified_base 153: mod_base = OTHER; note = N1-methylpseudouracil
  modified_base 166: mod_base = OTHER; note = N1-methylpseudouracil
  modified_base 175: mod_base = OTHER; note = N1-methylpseudouracil
  modified_base 179: mod_base = OTHER; note = N1-methylpseudouracil
  modified_base 182: mod_base = OTHER; note = N1-methylpseudouracil
  modified_base 185: mod_base = OTHER; note = N1-methylpseudouracil
  modified_base 196: mod_base = OTHER; note = N1-methylpseudouracil
  modified_base 202: mod_base = OTHER; note = N1-methylpseudouracil
  modified_base 205: mod_base = OTHER; note = N1-methylpseudouracil
  modified_base 210: mod_base = OTHER; note = N1-methylpseudouracil
  modified_base 220: mod_base = OTHER; note = N1-methylpseudouracil
  modified_base 221: mod_base = OTHER; note = N1-methylpseudouracil
  modified_base 239: mod_base = OTHER; note = N1-methylpseudouracil
  modified_base 250: mod_base = OTHER; note = N1-methylpseudouracil
  modified_base 269: mod_base = OTHER; note = N1-methylpseudouracil
  modified_base 272: mod_base = OTHER; note = N1-methylpseudouracil
  modified_base 283: mod_base = OTHER; note = N1-methylpseudouracil
  modified_base 290: mod_base = OTHER; note = N1-methylpseudouracil
  modified_base 295: mod_base = OTHER; note = N1-methylpseudouracil
  modified_base 296: mod_base = OTHER; note = N1-methylpseudouracil
  modified_base 299: mod_base = OTHER; note = N1-methylpseudouracil
  modified_base 311: mod_base = OTHER; note = N1-methylpseudouracil
  modified_base 313: mod_base = OTHER; note = N1-methylpseudouracil
  modified_base 315: mod_base = OTHER; note = N1-methylpseudouracil
  modified_base 320: mod_base = OTHER; note = N1-methylpseudouracil
  modified_base 326: mod_base = OTHER; note = N1-methylpseudouracil
  modified_base 329: mod_base = OTHER; note = N1-methylpseudouracil
  modified_base 344: mod_base = OTHER; note = N1-methylpseudouracil
  modified_base 350: mod_base = OTHER; note = N1-methylpseudouracil
  modified_base 351: mod_base = OTHER; note = N1-methylpseudouracil
  modified_base 370: mod_base = OTHER; note = N1-methylpseudouracil
  modified_base 372: mod_base = OTHER; note = N1-methylpseudouracil
  modified_base 377: mod_base = OTHER; note = N1-methylpseudouracil
  modified_base 380: mod_base = OTHER; note = N1-methylpseudouracil
  modified_base 386: mod_base = OTHER; note = N1-methylpseudouracil
  modified_base 401: mod_base = OTHER; note = N1-methylpseudouracil
  modified_base 404: mod_base = OTHER; note = N1-methylpseudouracil
  modified_base 407: mod_base = OTHER; note = N1-methylpseudouracil
  modified_base 413: mod_base = OTHER; note = N1-methylpseudouracil
  modified_base 420: mod_base = OTHER; note = N1-methylpseudouracil
  modified_base 426: mod_base = OTHER; note = N1-methylpseudouracil
  modified_base 437: mod_base = OTHER; note = N1-methylpseudouracil
  modified_base 443: mod_base = OTHER; note = N1-methylpseudouracil
  modified_base 449: mod_base = OTHER; note = N1-methylpseudouracil
  modified_base 466: mod_base = OTHER; note = N1-methylpseudouracil
  modified_base 471: mod_base = OTHER; note = N1-methylpseudouracil
  modified_base 473: mod_base = OTHER; note = N1-methylpseudouracil
  modified_base 479: mod_base = OTHER; note = N1-methylpseudouracil
  modified_base 481: mod_base = OTHER; note = N1-methylpseudouracil
  modified_base 484: mod_base = OTHER; note = N1-methylpseudouracil
  modified_base 488: mod_base = OTHER; note = N1-methylpseudouracil
  modified_base 491: mod_base = OTHER; note = N1-methylpseudouracil
  modified_base 497: mod_base = OTHER; note = N1-methylpseudouracil
  modified_base 499: mod_base = OTHER; note = N1-methylpseudouracil
  modified_base 509: mod_base = OTHER; note = N1-methylpseudouracil
  modified_base 519: mod_base = OTHER; note = N1-methylpseudouracil
  modified_base 521: mod_base = OTHER; note = N1-methylpseudouracil
  modified_base 530: mod_base = OTHER; note = N1-methylpseudouracil
  modified_base 539: mod_base = OTHER; note = N1-methylpseudouracil
  modified_base 551: mod_base = OTHER; note = N1-methylpseudouracil
  modified_base 563: mod_base = OTHER; note = N1-methylpseudouracil
  modified_base 565: mod_base = OTHER; note = N1-methylpseudouracil
  modified_base 572: mod_base = OTHER; note = N1-methylpseudouracil
  modified_base 577: mod_base = OTHER; note = N1-methylpseudouracil
  modified_base 583: mod_base = OTHER; note = N1-methylpseudouracil
  modified_base 584: mod_base = OTHER; note = N1-methylpseudouracil
  modified_base 590: mod_base = OTHER; note = N1-methylpseudouracil
  modified_base 595: mod_base = OTHER; note = N1-methylpseudouracil
  modified_base 596: mod_base = OTHER; note = N1-methylpseudouracil
  modified_base 601: mod_base = OTHER; note = N1-methylpseudouracil
  modified_base 604: mod_base = OTHER; note = N1-methylpseudouracil
  modified_base 605: mod_base = OTHER; note = N1-methylpseudouracil
  modified_base 608: mod_base = OTHER; note = N1-methylpseudouracil
  modified_base 620: mod_base = OTHER; note = N1-methylpseudouracil
  modified_base 628: mod_base = OTHER; note = N1-methylpseudouracil
  modified_base 629: mod_base = OTHER; note = N1-methylpseudouracil
  modified_base 632: mod_base = OTHER; note = N1-methylpseudouracil
  modified_base 645: mod_base = OTHER; note = N1-methylpseudouracil
  modified_base 653: mod_base = OTHER; note = N1-methylpseudouracil
  modified_base 664: mod_base = OTHER; note = N1-methylpseudouracil
  modified_base 674: mod_base = OTHER; note = N1-methylpseudouracil
  modified_base 678: mod_base = OTHER; note = N1-methylpseudouracil
  modified_base 679: mod_base = OTHER; note = N1-methylpseudouracil
  modified_base 682: mod_base = OTHER; note = N1-methylpseudouracil
  modified_base 683: mod_base = OTHER; note = N1-methylpseudouracil
  modified_base 685: mod_base = OTHER; note = N1-methylpseudouracil
  modified_base 689: mod_base = OTHER; note = N1-methylpseudouracil
  modified_base 697: mod_base = OTHER; note = N1-methylpseudouracil
  modified_base 698: mod_base = OTHER; note = N1-methylpseudouracil
  modified_base 703: mod_base = OTHER; note = N1-methylpseudouracil
  modified_base 704: mod_base = OTHER; note = N1-methylpseudouracil
  modified_base 713: mod_base = OTHER; note = N1-methylpseudouracil
  modified_base 716: mod_base = OTHER; note = N1-methylpseudouracil
  modified_base 722: mod_base = OTHER; note = N1-methylpseudouracil
  modified_base 742: mod_base = OTHER; note = N1-methylpseudouracil
  modified_base 743: mod_base = OTHER; note = N1-methylpseudouracil
  modified_base 752: mod_base = OTHER; note = N1-methylpseudouracil
  modified_base 755: mod_base = OTHER; note = N1-methylpseudouracil
  modified_base 770: mod_base = OTHER; note = N1-methylpseudouracil
  modified_base 782: mod_base = OTHER; note = N1-methylpseudouracil
  modified_base 798: mod_base = OTHER; note = N1-methylpseudouracil
  modified_base 802: mod_base = OTHER; note = N1-methylpseudouracil
  modified_base 803: mod_base = OTHER; note = N1-methylpseudouracil
  modified_base 810: mod_base = OTHER; note = N1-methylpseudouracil
  modified_base 812: mod_base = OTHER; note = N1-methylpseudouracil
  modified_base 815: mod_base = OTHER; note = N1-methylpseudouracil
  modified_base 827: mod_base = OTHER; note = N1-methylpseudouracil
  modified_base 829: mod_base = OTHER; note = N1-methylpseudouracil
  modified_base 842: mod_base = OTHER; note = N1-methylpseudouracil
  modified_base 847: mod_base = OTHER; note = N1-methylpseudouracil
  modified_base 863: mod_base = OTHER; note = N1-methylpseudouracil
  modified_base 869: mod_base = OTHER; note = N1-methylpseudouracil
  modified_base 872: mod_base = OTHER; note = N1-methylpseudouracil
  modified_base 875: mod_base = OTHER; note = N1-methylpseudouracil
  modified_base 877: mod_base = OTHER; note = N1-methylpseudouracil
  modified_base 878: mod_base = OTHER; note = N1-methylpseudouracil
  modified_base 881: mod_base = OTHER; note = N1-methylpseudouracil
  modified_base 883: mod_base = OTHER; note = N1-methylpseudouracil
  modified_base 895: mod_base = OTHER; note = N1-methylpseudouracil
  modified_base 901: mod_base = OTHER; note = N1-methylpseudouracil
  modified_base 902: mod_base = OTHER; note = N1-methylpseudouracil
  modified_base 908: mod_base = OTHER; note = N1-methylpseudouracil
  modified_base 920: mod_base = OTHER; note = N1-methylpseudouracil
  modified_base 927: mod_base = OTHER; note = N1-methylpseudouracil
  modified_base 929: mod_base = OTHER; note = N1-methylpseudouracil
  modified_base 932: mod_base = OTHER; note = N1-methylpseudouracil
  modified_base 935: mod_base = OTHER; note = N1-methylpseudouracil
  modified_base 939: mod_base = OTHER; note = N1-methylpseudouracil
  modified_base 950: mod_base = OTHER; note = N1-methylpseudouracil
  modified_base 952: mod_base = OTHER; note = N1-methylpseudouracil
  modified_base 959: mod_base = OTHER; note = N1-methylpseudouracil
  modified_base 976: mod_base = OTHER; note = N1-methylpseudouracil
  modified_base 983: mod_base = OTHER; note = N1-methylpseudouracil
  modified_base 992: mod_base = OTHER; note = N1-methylpseudouracil
  modified_base 995: mod_base = OTHER; note = N1-methylpseudouracil
  modified_base 1000: mod_base = OTHER; note = N1-methylpseudouracil
  modified_base 1010: mod_base = OTHER; note = N1-methylpseudouracil
  modified_base 1019: mod_base = OTHER; note = N1-methylpseudouracil
  modified_base 1022: mod_base = OTHER; note = N1-methylpseudouracil
  modified_base 1031: mod_base = OTHER; note = N1-methylpseudouracil
  modified_base 1034: mod_base = OTHER; note = N1-methylpseudouracil
  modified_base 1046: mod_base = OTHER; note = N1-methylpseudouracil
  modified_base 1049: mod_base = OTHER; note = N1-methylpseudouracil
  modified_base 1052: mod_base = OTHER; note = N1-methylpseudouracil
  modified_base 1055: mod_base = OTHER; note = N1-methylpseudouracil
  modified_base 1057: mod_base = OTHER; note = N1-methylpseudouracil
  modified_base 1058: mod_base = OTHER; note = N1-methylpseudouracil
  modified_base 1064: mod_base = OTHER; note = N1-methylpseudouracil
  modified_base 1079: mod_base = OTHER; note = N1-methylpseudouracil
  modified_base 1085: mod_base = OTHER; note = N1-methylpseudouracil
  modified_base 1087: mod_base = OTHER; note = N1-methylpseudouracil
  modified_base 1096: mod_base = OTHER; note = N1-methylpseudouracil
  modified_base 1106: mod_base = OTHER; note = N1-methylpseudouracil
  modified_base 1109: mod_base = OTHER; note = N1-methylpseudouracil
  modified_base 1110: mod_base = OTHER; note = N1-methylpseudouracil
  modified_base 1124: mod_base = OTHER; note = N1-methylpseudouracil
  modified_base 1128: mod_base = OTHER; note = N1-methylpseudouracil
  modified_base 1130: mod_base = OTHER; note = N1-methylpseudouracil
  modified_base 1133: mod_base = OTHER; note = N1-methylpseudouracil
  modified_base 1154: mod_base = OTHER; note = N1-methylpseudouracil
  modified_base 1157: mod_base = OTHER; note = N1-methylpseudouracil
  modified_base 1163: mod_base = OTHER; note = N1-methylpseudouracil
  modified_base 1166: mod_base = OTHER; note = N1-methylpseudouracil
  modified_base 1169: mod_base = OTHER; note = N1-methylpseudouracil
  modified_base 1171: mod_base = OTHER; note = N1-methylpseudouracil
  modified_base 1177: mod_base = OTHER; note = N1-methylpseudouracil
  modified_base 1187: mod_base = OTHER; note = N1-methylpseudouracil
  modified_base 1199: mod_base = OTHER; note = N1-methylpseudouracil
  modified_base 1205: mod_base = OTHER; note = N1-methylpseudouracil
  modified_base 1211: mod_base = OTHER; note = N1-methylpseudouracil
  modified_base 1214: mod_base = OTHER; note = N1-methylpseudouracil
  modified_base 1232: mod_base = OTHER; note = N1-methylpseudouracil
  modified_base 1238: mod_base = OTHER; note = N1-methylpseudouracil
  modified_base 1240: mod_base = OTHER; note = N1-methylpseudouracil
  modified_base 1243: mod_base = OTHER; note = N1-methylpseudouracil
  modified_base 1244: mod_base = OTHER; note = N1-methylpseudouracil
  modified_base 1253: mod_base = OTHER; note = N1-methylpseudouracil
  modified_base 1255: mod_base = OTHER; note = N1-methylpseudouracil
  modified_base 1271: mod_base = OTHER; note = N1-methylpseudouracil
  modified_base 1273: mod_base = OTHER; note = N1-methylpseudouracil
  modified_base 1274: mod_base = OTHER; note = N1-methylpseudouracil
  modified_base 1291: mod_base = OTHER; note = N1-methylpseudouracil
  modified_base 1301: mod_base = OTHER; note = N1-methylpseudouracil
  modified_base 1307: mod_base = OTHER; note = N1-methylpseudouracil
  modified_base 1324: mod_base = OTHER; note = N1-methylpseudouracil
  modified_base 1325: mod_base = OTHER; note = N1-methylpseudouracil
  modified_base 1331: mod_base = OTHER; note = N1-methylpseudouracil
  modified_base 1337: mod_base = OTHER; note = N1-methylpseudouracil
  modified_base 1343: mod_base = OTHER; note = N1-methylpseudouracil
  modified_base 1347: mod_base = OTHER; note = N1-methylpseudouracil
  modified_base 1351: mod_base = OTHER; note = N1-methylpseudouracil
  modified_base 1353: mod_base = OTHER; note = N1-methylpseudouracil
  modified_base 1373: mod_base = OTHER; note = N1-methylpseudouracil
  modified_base 1376: mod_base = OTHER; note = N1-methylpseudouracil
  modified_base 1379: mod_base = OTHER; note = N1-methylpseudouracil
  modified_base 1388: mod_base = OTHER; note = N1-methylpseudouracil
  modified_base 1394: mod_base = OTHER; note = N1-methylpseudouracil
  modified_base 1406: mod_base = OTHER; note = N1-methylpseudouracil
  modified_base 1412: mod_base = OTHER; note = N1-methylpseudouracil
  modified_base 1415: mod_base = OTHER; note = N1-methylpseudouracil
  modified_base 1418: mod_base = OTHER; note = N1-methylpseudouracil
  modified_base 1420: mod_base = OTHER; note = N1-methylpseudouracil
  modified_base 1422: mod_base = OTHER; note = N1-methylpseudouracil
  modified_base 1429: mod_base = OTHER; note = N1-methylpseudouracil
  modified_base 1435: mod_base = OTHER; note = N1-methylpseudouracil
  modified_base 1441: mod_base = OTHER; note = N1-methylpseudouracil
  modified_base 1454: mod_base = OTHER; note = N1-methylpseudouracil
  modified_base 1460: mod_base = OTHER; note = N1-methylpseudouracil
  modified_base 1465: mod_base = OTHER; note = N1-methylpseudouracil
  modified_base 1467: mod_base = OTHER; note = N1-methylpseudouracil
  modified_base 1474: mod_base = OTHER; note = N1-methylpseudouracil
  modified_base 1494: mod_base = OTHER; note = N1-methylpseudouracil
  modified_base 1495: mod_base = OTHER; note = N1-methylpseudouracil
  modified_base 1496: mod_base = OTHER; note = N1-methylpseudouracil
  modified_base 1501: mod_base = OTHER; note = N1-methylpseudouracil
  modified_base 1503: mod_base = OTHER; note = N1-methylpseudouracil
  modified_base 1508: mod_base = OTHER; note = N1-methylpseudouracil
  modified_base 1510: mod_base = OTHER; note = N1-methylpseudouracil
  modified_base 1512: mod_base = OTHER; note = N1-methylpseudouracil
  modified_base 1516: mod_base = OTHER; note = N1-methylpseudouracil
  modified_base 1527: mod_base = OTHER; note = N1-methylpseudouracil
  modified_base 1532: mod_base = OTHER; note = N1-methylpseudouracil
  modified_base 1543: mod_base = OTHER; note = N1-methylpseudouracil
  modified_base 1545: mod_base = OTHER; note = N1-methylpseudouracil
  modified_base 1549: mod_base = OTHER; note = N1-methylpseudouracil
  modified_base 1562: mod_base = OTHER; note = N1-methylpseudouracil
  modified_base 1565: mod_base = OTHER; note = N1-methylpseudouracil
  modified_base 1579: mod_base = OTHER; note = N1-methylpseudouracil
  modified_base 1606: mod_base = OTHER; note = N1-methylpseudouracil
  modified_base 1608: mod_base = OTHER; note = N1-methylpseudouracil
  modified_base 1609: mod_base = OTHER; note = N1-methylpseudouracil
  modified_base 1614: mod_base = OTHER; note = N1-methylpseudouracil
  modified_base 1624: mod_base = OTHER; note = N1-methylpseudouracil
  modified_base 1627: mod_base = OTHER; note = N1-methylpseudouracil
  modified_base 1630: mod_base = OTHER; note = N1-methylpseudouracil
  modified_base 1639: mod_base = OTHER; note = N1-methylpseudouracil
  modified_base 1643: mod_base = OTHER; note = N1-methylpseudouracil
  modified_base 1645: mod_base = OTHER; note = N1-methylpseudouracil
  modified_base 1647: mod_base = OTHER; note = N1-methylpseudouracil
  modified_base 1652: mod_base = OTHER; note = N1-methylpseudouracil
  modified_base 1660: mod_base = OTHER; note = N1-methylpseudouracil
  modified_base 1670: mod_base = OTHER; note = N1-methylpseudouracil
  modified_base 1672: mod_base = OTHER; note = N1-methylpseudouracil
  modified_base 1681: mod_base = OTHER; note = N1-methylpseudouracil
  modified_base 1684: mod_base = OTHER; note = N1-methylpseudouracil
  modified_base 1690: mod_base = OTHER; note = N1-methylpseudouracil
  modified_base 1699: mod_base = OTHER; note = N1-methylpseudouracil
  modified_base 1700: mod_base = OTHER; note = N1-methylpseudouracil
  modified_base 1702: mod_base = OTHER; note = N1-methylpseudouracil
  modified_base 1705: mod_base = OTHER; note = N1-methylpseudouracil
  modified_base 1709: mod_base = OTHER; note = N1-methylpseudouracil
  modified_base 1724: mod_base = OTHER; note = N1-methylpseudouracil
  modified_base 1727: mod_base = OTHER; note = N1-methylpseudouracil
  modified_base 1729: mod_base = OTHER; note = N1-methylpseudouracil
  modified_base 1731: mod_base = OTHER; note = N1-methylpseudouracil
  modified_base 1747: mod_base = OTHER; note = N1-methylpseudouracil
  modified_base 1753: mod_base = OTHER; note = N1-methylpseudouracil
  modified_base 1762: mod_base = OTHER; note = N1-methylpseudouracil
  modified_base 1766: mod_base = OTHER; note = N1-methylpseudouracil
  modified_base 1768: mod_base = OTHER; note = N1-methylpseudouracil
  modified_base 1776: mod_base = OTHER; note = N1-methylpseudouracil
  modified_base 1780: mod_base = OTHER; note = N1-methylpseudouracil
  modified_base 1792: mod_base = OTHER; note = N1-methylpseudouracil
  modified_base 1795: mod_base = OTHER; note = N1-methylpseudouracil
  modified_base 1801: mod_base = OTHER; note = N1-methylpseudouracil
  modified_base 1810: mod_base = OTHER; note = N1-methylpseudouracil
  modified_base 1819: mod_base = OTHER; note = N1-methylpseudouracil
  modified_base 1821: mod_base = OTHER; note = N1-methylpseudouracil
  modified_base 1822: mod_base = OTHER; note = N1-methylpseudouracil
  modified_base 1826: mod_base = OTHER; note = N1-methylpseudouracil
  modified_base 1828: mod_base = OTHER; note = N1-methylpseudouracil
  modified_base 1841: mod_base = OTHER; note = N1-methylpseudouracil
  modified_base 1844: mod_base = OTHER; note = N1-methylpseudouracil
  modified_base 1846: mod_base = OTHER; note = N1-methylpseudouracil
  modified_base 1848: mod_base = OTHER; note = N1-methylpseudouracil
  modified_base 1849: mod_base = OTHER; note = N1-methylpseudouracil
  modified_base 1863: mod_base = OTHER; note = N1-methylpseudouracil
  modified_base 1864: mod_base = OTHER; note = N1-methylpseudouracil
  modified_base 1868: mod_base = OTHER; note = N1-methylpseudouracil
  modified_base 1870: mod_base = OTHER; note = N1-methylpseudouracil
  modified_base 1879: mod_base = OTHER; note = N1-methylpseudouracil
  modified_base 1883: mod_base = OTHER; note = N1-methylpseudouracil
  modified_base 1885: mod_base = OTHER; note = N1-methylpseudouracil
  modified_base 1896: mod_base = OTHER; note = N1-methylpseudouracil
  modified_base 1903: mod_base = OTHER; note = N1-methylpseudouracil
  modified_base 1908: mod_base = OTHER; note = N1-methylpseudouracil
  modified_base 1911: mod_base = OTHER; note = N1-methylpseudouracil
  modified_base 1915: mod_base = OTHER; note = N1-methylpseudouracil
  modified_base 1924: mod_base = OTHER; note = N1-methylpseudouracil
  modified_base 1933: mod_base = OTHER; note = N1-methylpseudouracil
  modified_base 1935: mod_base = OTHER; note = N1-methylpseudouracil
  modified_base 1945: mod_base = OTHER; note = N1-methylpseudouracil
  modified_base 1960: mod_base = OTHER; note = N1-methylpseudouracil
  modified_base 1962: mod_base = OTHER; note = N1-methylpseudouracil
  modified_base 1963: mod_base = OTHER; note = N1-methylpseudouracil
  modified_base 1967: mod_base = OTHER; note = N1-methylpseudouracil
  modified_base 1972: mod_base = OTHER; note = N1-methylpseudouracil
  modified_base 1979: mod_base = OTHER; note = N1-methylpseudouracil
  modified_base 1981: mod_base = OTHER; note = N1-methylpseudouracil
  modified_base 1998: mod_base = OTHER; note = N1-methylpseudouracil
  modified_base 2008: mod_base = OTHER; note = N1-methylpseudouracil
  modified_base 2012: mod_base = OTHER; note = N1-methylpseudouracil
  modified_base 2020: mod_base = OTHER; note = N1-methylpseudouracil
  modified_base 2027: mod_base = OTHER; note = N1-methylpseudouracil
  modified_base 2042: mod_base = OTHER; note = N1-methylpseudouracil
  modified_base 2046: mod_base = OTHER; note = N1-methylpseudouracil
  modified_base 2059: mod_base = OTHER; note = N1-methylpseudouracil
  modified_base 2060: mod_base = OTHER; note = N1-methylpseudouracil
  modified_base 2062: mod_base = OTHER; note = N1-methylpseudouracil
  modified_base 2078: mod_base = OTHER; note = N1-methylpseudouracil
  modified_base 2080: mod_base = OTHER; note = N1-methylpseudouracil
  modified_base 2083: mod_base = OTHER; note = N1-methylpseudouracil
  modified_base 2086: mod_base = OTHER; note = N1-methylpseudouracil
  modified_base 2090: mod_base = OTHER; note = N1-methylpseudouracil
  modified_base 2107: mod_base = OTHER; note = N1-methylpseudouracil
  modified_base 2111: mod_base = OTHER; note = N1-methylpseudouracil
  modified_base 2114: mod_base = OTHER; note = N1-methylpseudouracil
  modified_base 2119: mod_base = OTHER; note = N1-methylpseudouracil
  modified_base 2120: mod_base = OTHER; note = N1-methylpseudouracil
  modified_base 2123: mod_base = OTHER; note = N1-methylpseudouracil
  modified_base 2126: mod_base = OTHER; note = N1-methylpseudouracil
  modified_base 2153: mod_base = OTHER; note = N1-methylpseudouracil
  modified_base 2156: mod_base = OTHER; note = N1-methylpseudouracil
  modified_base 2161: mod_base = OTHER; note = N1-methylpseudouracil
  modified_base 2165: mod_base = OTHER; note = N1-methylpseudouracil
  modified_base 2179: mod_base = OTHER; note = N1-methylpseudouracil
  modified_base 2193: mod_base = OTHER; note = N1-methylpseudouracil
  modified_base 2198: mod_base = OTHER; note = N1-methylpseudouracil
  modified_base 2204: mod_base = OTHER; note = N1-methylpseudouracil
  modified_base 2207: mod_base = OTHER; note = N1-methylpseudouracil
  modified_base 2210: mod_base = OTHER; note = N1-methylpseudouracil
  modified_base 2213: mod_base = OTHER; note = N1-methylpseudouracil
  modified_base 2219: mod_base = OTHER; note = N1-methylpseudouracil
  modified_base 2225: mod_base = OTHER; note = N1-methylpseudouracil
  modified_base 2231: mod_base = OTHER; note = N1-methylpseudouracil
  modified_base 2234: mod_base = OTHER; note = N1-methylpseudouracil
  modified_base 2237: mod_base = OTHER; note = N1-methylpseudouracil
  modified_base 2240: mod_base = OTHER; note = N1-methylpseudouracil
  modified_base 2246: mod_base = OTHER; note = N1-methylpseudouracil
  modified_base 2249: mod_base = OTHER; note = N1-methylpseudouracil
  modified_base 2252: mod_base = OTHER; note = N1-methylpseudouracil
  modified_base 2255: mod_base = OTHER; note = N1-methylpseudouracil
  modified_base 2257: mod_base = OTHER; note = N1-methylpseudouracil
  modified_base 2261: mod_base = OTHER; note = N1-methylpseudouracil
  modified_base 2263: mod_base = OTHER; note = N1-methylpseudouracil
  modified_base 2270: mod_base = OTHER; note = N1-methylpseudouracil
  modified_base 2273: mod_base = OTHER; note = N1-methylpseudouracil
  modified_base 2276: mod_base = OTHER; note = N1-methylpseudouracil
  modified_base 2278: mod_base = OTHER; note = N1-methylpseudouracil
  modified_base 2281: mod_base = OTHER; note = N1-methylpseudouracil
  modified_base 2282: mod_base = OTHER; note = N1-methylpseudouracil
  modified_base 2300: mod_base = OTHER; note = N1-methylpseudouracil
  modified_base 2308: mod_base = OTHER; note = N1-methylpseudouracil
  modified_base 2309: mod_base = OTHER; note = N1-methylpseudouracil
  modified_base 2323: mod_base = OTHER; note = N1-methylpseudouracil
  modified_base 2325: mod_base = OTHER; note = N1-methylpseudouracil
  modified_base 2335: mod_base = OTHER; note = N1-methylpseudouracil
  modified_base 2355: mod_base = OTHER; note = N1-methylpseudouracil
  modified_base 2357: mod_base = OTHER; note = N1-methylpseudouracil
  modified_base 2359: mod_base = OTHER; note = N1-methylpseudouracil
  modified_base 2368: mod_base = OTHER; note = N1-methylpseudouracil
  modified_base 2380: mod_base = OTHER; note = N1-methylpseudouracil
  modified_base 2381: mod_base = OTHER; note = N1-methylpseudouracil
  modified_base 2390: mod_base = OTHER; note = N1-methylpseudouracil
  modified_base 2395: mod_base = OTHER; note = N1-methylpseudouracil
  modified_base 2420: mod_base = OTHER; note = N1-methylpseudouracil
  modified_base 2426: mod_base = OTHER; note = N1-methylpseudouracil
  modified_base 2428: mod_base = OTHER; note = N1-methylpseudouracil
  modified_base 2437: mod_base = OTHER; note = N1-methylpseudouracil
  modified_base 2439: mod_base = OTHER; note = N1-methylpseudouracil
  modified_base 2450: mod_base = OTHER; note = N1-methylpseudouracil
  modified_base 2457: mod_base = OTHER; note = N1-methylpseudouracil
  modified_base 2462: mod_base = OTHER; note = N1-methylpseudouracil
  modified_base 2465: mod_base = OTHER; note = N1-methylpseudouracil
  modified_base 2471: mod_base = OTHER; note = N1-methylpseudouracil
  modified_base 2476: mod_base = OTHER; note = N1-methylpseudouracil
  modified_base 2482: mod_base = OTHER; note = N1-methylpseudouracil
  modified_base 2488: mod_base = OTHER; note = N1-methylpseudouracil
  modified_base 2500: mod_base = OTHER; note = N1-methylpseudouracil
  modified_base 2504: mod_base = OTHER; note = N1-methylpseudouracil
  modified_base 2509: mod_base = OTHER; note = N1-methylpseudouracil
  modified_base 2513: mod_base = OTHER; note = N1-methylpseudouracil
  modified_base 2514: mod_base = OTHER; note = N1-methylpseudouracil
  modified_base 2516: mod_base = OTHER; note = N1-methylpseudouracil
  modified_base 2517: mod_base = OTHER; note = N1-methylpseudouracil
  modified_base 2523: mod_base = OTHER; note = N1-methylpseudouracil
  modified_base 2524: mod_base = OTHER; note = N1-methylpseudouracil
  modified_base 2530: mod_base = OTHER; note = N1-methylpseudouracil
  modified_base 2543: mod_base = OTHER; note = N1-methylpseudouracil
  modified_base 2546: mod_base = OTHER; note = N1-methylpseudouracil
  modified_base 2551: mod_base = OTHER; note = N1-methylpseudouracil
  modified_base 2552: mod_base = OTHER; note = N1-methylpseudouracil
  modified_base 2555: mod_base = OTHER; note = N1-methylpseudouracil
  modified_base 2563: mod_base = OTHER; note = N1-methylpseudouracil
  modified_base 2579: mod_base = OTHER; note = N1-methylpseudouracil
  modified_base 2580: mod_base = OTHER; note = N1-methylpseudouracil
  modified_base 2582: mod_base = OTHER; note = N1-methylpseudouracil
  modified_base 2588: mod_base = OTHER; note = N1-methylpseudouracil
  modified_base 2593: mod_base = OTHER; note = N1-methylpseudouracil
  modified_base 2596: mod_base = OTHER; note = N1-methylpseudouracil
  modified_base 2598: mod_base = OTHER; note = N1-methylpseudouracil
  modified_base 2599: mod_base = OTHER; note = N1-methylpseudouracil
  modified_base 2600: mod_base = OTHER; note = N1-methylpseudouracil
  modified_base 2604: mod_base = OTHER; note = N1-methylpseudouracil
  modified_base 2609: mod_base = OTHER; note = N1-methylpseudouracil
  modified_base 2611: mod_base = OTHER; note = N1-methylpseudouracil
  modified_base 2615: mod_base = OTHER; note = N1-methylpseudouracil
ggaaatcgcaaaatttgctcttcgcgttagatttcttttagttttctcgcaactagcaagctttttgttctcgccatggggatcgagctgctgtgcctgttcttcctgttcctgggacggaacgaccacgtgcagggtggctgcgcccttggtggggcagagacctgcgaggactgcctgctcatcggcccacagtgcgcctggtgcgctcaggagaacttcacccaccccagcggagtgggcgagaggtgcgacaccccggccaacctgctggccaaggggtgccagctgaacttcatcgagaaccccgtctctcaggtggagatcctgaagaacaagcccctcagcgttgggcggcagaagaacagctctgacatcgtgcagatcgcgccccagagcctgatcctgaaactacggcctggcggtgcgcaaaccctgcaggtccacgtgcggcagaccgaggactaccctgtggacctgtactacctgatggacctctccgccagcatggacgacgatctgaacaccatcaaggagctgggcagccgcctgagcaaggagatgtccaagctgacctccaacttccgcctggggttcggatccttcgtggagaagcccgtgagccccttcgtgaagaccacccctgaggagatcgccaacccctgcagcagcatcccttacttctgcctgcccaccttcggcttcaagcacatcctgccactgaccaacgacgccgagcggttcaacgagatcgtgaagaaccagaagatcagcgccaacatcgacaccccggagggtgggttcgacgctatcatgcaggccgccgtgtgcaaggagaagatcggctggcgcaacgacagcctgcacctgctggtgttcgtgtccgacgccgactcccacttcggcatggacagcaagctggccggtatcgtgatccctaacgacggcctgtgccacctggacagcaagaacgagtacagcatgagcaccgtgctggagtaccccaccatcggccagctgatcgacaagctggtgcagaacaacgtgctgctgatcttcgccgtgacccaggagcaggtgcacctctacgagaactacgccaagctgattccaggcgccaccgtcggtctgctgcagaaggacagcggcaacatcctgcagctgatcatctccgcctacgaggagctgaggagcgaggtggagctggaggtgctcggggacaccgagggcctgaacctgtccttcaccgccatctgcaacaacgggaccctcttccagcaccagaagaagtgcagccacatgaaggtgggcgacaccgccagcttcagcgtcaccgtgaacatacctcactgtgagcggcggagcaggcacatcatcatcaagcccgtgggcctgggagacgccctggagctgctggtgtctcccgagtgcaactgcgactgccagaaggaggtggaggtgaactctagcaagtgccaccacggcaacgggagtttccagtgtggcgtgtgtgcctgccaccccggtcacatgggaccccggtgtgagtgcggggaggacatgctgagcaccgacagctgcaaggaggccccagaccacccgagctgttccggtcggggcgactgctactgcggccagtgcatctgtcacctgagcccctacggcaacatctacgggccctactgccagtgcgacaacttctcctgcgtgcgccacaaaggcctgctgtgtggcggcaacggcgactgcgactgcggggagtgcgtgtgccgcagtgggtggaccggcgagtactgcaactgcaccacctccaccgactcttgcgtgtccgaggacggggtgctgtgttccgggcgcggagattgcgtgtgcgggaagtgcgtgtgcaccaaccctggcgcatcgggtcctacctgcgagaggtgccccacctgtggcgacccctgcaacagcaagcgctcttgcatcgagtgccacctctcagcagcagggcaggctcgggaggagtgcgtggacaagtgcaagctcgccggcgccaccatcagtgaggaggaggacttctccaaggacggcagcgtgtcctgctccctccagggcgagaacgagtgcctcatcaccttcctgatcaccaccgacaacgagggcaagaccatcatccactccatcaacgagaaggactgccccaagccgcctaacatccccatgatcatgctgggcgtgagcctggccatcctgctgatcggcgtggtgctgctgtgcatctggaagctgctggtctccttccacgaccgcaaggaggtggccaagttcgaggccgagcgctctaaggccaagtggcagaccggcaccaaccctctgtaccggggctccaccagcaccttcaagaacgtgacctacaagcaccgcgagaagcagaaggtggacctgtccaccgactgtggcaagcccatccccaatcccctgctggggctggactccacctaaagctccccgggggcctcggtggcctagcttcttgccccttgggcctccccccagcccctcctccccttcctgcacccgtaccccccaaacaccattgtcacactccagtggtctttgaataaagtctgagtgggcggc

SEQ ID NO: 170 - RNA, 2622 nt, unidentified
  source 1..2622: mol_type = unassigned RNA
  modified_base 6: mod_base = OTHER; note = N1-methylpseudouracil
  modified_base 14: mod_base = OTHER; note = N1-methylpseudouracil
  modified_base 15: mod_base = OTHER; note = N1-methylpseudouracil
  modified_base 16: mod_base = OTHER; note = N1-methylpseudouracil
  modified_base 19: mod_base = OTHER; note = N1-methylpseudouracil
  modified_base 21: mod_base = OTHER; note = N1-methylpseudouracil
  modified_base 22: mod_base = OTHER; note = N1-methylpseudouracil
  modified_base 27: mod_base = OTHER; note = N1-methylpseudouracil
  modified_base 28: mod_base = OTHER; note = N1-methylpseudouracil
  modified_base 32: mod_base = OTHER; note = N1-methylpseudouracil
  modified_base 33: mod_base = OTHER; note = N1-methylpseudouracil
  modified_base 34: mod_base = OTHER; note = N1-methylpseudouracil
  modified_base 36: mod_base = OTHER; note = N1-methylpseudouracil
  modified_base 37: mod_base = OTHER; note = N1-methylpseudouracil
  modified_base 38: mod_base = OTHER; note = N1-methylpseudouracil
  modified_base 39: mod_base = OTHER; note = N1-methylpseudouracil
  modified_base 42: mod_base = OTHER; note = N1-methylpseudouracil
  modified_base 43: mod_base = OTHER; note = N1-methylpseudouracil
  modified_base 44: mod_base = OTHER; note = N1-methylpseudouracil
  modified_base 45: mod_base = OTHER; note = N1-methylpseudouracil
  modified_base 47: mod_base = OTHER; note = N1-methylpseudouracil
  modified_base 54: mod_base = OTHER; note = N1-methylpseudouracil
  modified_base 62: mod_base = OTHER; note = N1-methylpseudouracil
  modified_base 63: mod_base = OTHER; note = N1-methylpseudouracil
  modified_base 64: mod_base = OTHER; note = N1-methylpseudouracil
  modified_base 65: mod_base = OTHER; note = N1-methylpseudouracil
  modified_base 66: mod_base = OTHER; note = N1-methylpseudouracil
  modified_base 68: mod_base = OTHER; note = N1-methylpseudouracil
  modified_base 69: mod_base = OTHER; note = N1-methylpseudouracil
  modified_base 71: mod_base = OTHER; note = N1-methylpseudouracil
  modified_base 77: mod_base = OTHER; note = N1-methylpseudouracil
  modified_base 83: mod_base = OTHER; note = N1-methylpseudouracil
  modified_base 89: mod_base = OTHER; note = N1-methylpseudouracil
  modified_base 92: mod_base = OTHER; note = N1-methylpseudouracil
  modified_base 94: mod_base = OTHER; note = N1-methylpseudouracil
  modified_base 98: mod_base = OTHER; note = N1-methylpseudouracil
  modified_base 100: mod_base = OTHER; note = N1-methylpseudouracil
  modified_base 101: mod_base = OTHER; note = N1-methylpseudouracil
  modified_base 103: mod_base = OTHER; note = N1-methylpseudouracil
  modified_base 104: mod_base = OTHER; note = N1-methylpseudouracil
  modified_base 107: mod_base = OTHER; note = N1-methylpseudouracil
  modified_base 109: mod_base = OTHER; note = N1-methylpseudouracil
  modified_base 110: mod_base = OTHER; note = N1-methylpseudouracil
  modified_base 113: mod_base = OTHER; note = N1-methylpseudouracil
  modified_base 131: mod_base = OTHER; note = N1-methylpseudouracil
  modified_base 138: mod_base = OTHER; note = N1-methylpseudouracil
  modified_base 142: mod_base = OTHER; note = N1-methylpseudouracil
  modified_base 149: mod_base = OTHER; note = N1-methylpseudouracil
  modified_base 150: mod_base = OTHER; note = N1-methylpseudouracil
  modified_base 153: mod_base = OTHER; note = N1-methylpseudouracil
  modified_base 166: mod_base = OTHER; note = N1-methylpseudouracil
  modified_base 175: mod_base = OTHER; note = N1-methylpseudouracil
  modified_base 179: mod_base = OTHER; note = N1-methylpseudouracil
  modified_base 182: mod_base = OTHER; note = N1-methylpseudouracil
  modified_base 185: mod_base = OTHER; note = N1-methylpseudouracil
  modified_base 196: mod_base = OTHER; note = N1-methylpseudouracil
  modified_base 202: mod_base = OTHER; note = N1-methylpseudouracil
  modified_base 205: mod_base = OTHER; note = N1-methylpseudouracil
  modified_base 210: mod_base = OTHER; note = N1-methylpseudouracil
  modified_base 220: mod_base = OTHER; note = N1-methylpseudouracil
  modified_base 221: mod_base = OTHER; note = N1-methylpseudouracil
  modified_base 239: mod_base = OTHER; note = N1-methylpseudouracil
  modified_base 250: mod_base = OTHER; note = N1-methylpseudouracil
  modified_base 269: mod_base = OTHER; note = N1-methylpseudouracil
  modified_base 272: mod_base = OTHER; note = N1-methylpseudouracil
  modified_base 283: mod_base = OTHER; note = N1-methylpseudouracil
  modified_base 290: mod_base = OTHER; note = N1-methylpseudouracil
  modified_base 295: mod_base = OTHER; note = N1-methylpseudouracil
  modified_base 296: mod_base = OTHER; note = N1-methylpseudouracil
  modified_base 299: mod_base = OTHER; note = N1-methylpseudouracil
  modified_base 311: mod_base = OTHER; note = N1-methylpseudouracil
  modified_base 313: mod_base = OTHER; note = N1-methylpseudouracil
  modified_base 315: mod_base = OTHER; note = N1-methylpseudouracil
  modified_base 320: mod_base = OTHER; note = N1-methylpseudouracil
  modified_base 326: mod_base = OTHER; note = N1-methylpseudouracil
  modified_base 329: mod_base = OTHER; note = N1-methylpseudouracil
  modified_base 344: mod_base = OTHER; note = N1-methylpseudouracil
  modified_base 350: mod_base = OTHER; note = N1-methylpseudouracil
  modified_base 351: mod_base = OTHER; note = N1-methylpseudouracil
  modified_base 370: mod_base = OTHER; note = N1-methylpseudouracil
  modified_base 372: mod_base = OTHER; note = N1-methylpseudouracil
  modified_base 377: mod_base = OTHER; note = N1-methylpseudouracil
  modified_base 380: mod_base = OTHER; note = N1-methylpseudouracil
  modified_base 386: mod_base = OTHER; note = N1-methylpseudouracil
  modified_base 401: mod_base = OTHER; note = N1-methylpseudouracil
  modified_base 404: mod_base = OTHER; note = N1-methylpseudouracil
  modified_base 407: mod_base = OTHER; note = N1-methylpseudouracil
  modified_base 413: mod_base = OTHER; note = N1-methylpseudouracil
  modified_base 420: mod_base = OTHER; note = N1-methylpseudouracil
  modified_base 426: mod_base = OTHER; note = N1-methylpseudouracil
  modified_base 437: mod_base = OTHER; note = N1-methylpseudouracil
  modified_base 443: mod_base = OTHER; note = N1-methylpseudouracil
  modified_base 449: mod_base = OTHER; note = N1-methylpseudouracil
  modified_base 466: mod_base = OTHER; note = N1-methylpseudouracil
  modified_base 471: mod_base = OTHER; note = N1-methylpseudouracil
  modified_base 473: mod_base = OTHER; note = N1-methylpseudouracil
  modified_base 479: mod_base = OTHER; note = N1-methylpseudouracil
  modified_base 481: mod_base = OTHER; note = N1-methylpseudouracil
  modified_base 484: mod_base = OTHER; note = N1-methylpseudouracil
  modified_base 488: mod_base = OTHER; note = N1-methylpseudouracil
  modified_base 491: mod_base = OTHER; note = N1-methylpseudouracil
  modified_base 497: mod_base = OTHER; note = N1-methylpseudouracil
  modified_base 499: mod_base = OTHER; note = N1-methylpseudouracil
  modified_base 509: mod_base = OTHER; note = N1-methylpseudouracil
  modified_base 519: mod_base = OTHER; note = N1-methylpseudouracil
  modified_base 521: mod_base = OTHER; note = N1-methylpseudouracil
  modified_base 530: mod_base = OTHER; note = N1-methylpseudouracil
  modified_base 539: mod_base = OTHER; note = N1-methylpseudouracil
  modified_base 551: mod_base = OTHER; note = N1-methylpseudouracil
  modified_base 563: mod_base = OTHER; note = N1-methylpseudouracil
  modified_base 565: mod_base = OTHER; note = N1-methylpseudouracil
  modified_base 572: mod_base = OTHER; note = N1-methylpseudouracil
  modified_base 577: mod_base = OTHER; note = N1-methylpseudouracil
  modified_base 583: mod_base = OTHER; note = N1-methylpseudouracil
  modified_base 584: mod_base = OTHER; note = N1-methylpseudouracil
  modified_base 590: mod_base = OTHER; note = N1-methylpseudouracil
  modified_base 595: mod_base = OTHER; note = N1-methylpseudouracil
  modified_base 596: mod_base = OTHER; note = N1-methylpseudouracil
  modified_base 601: mod_base = OTHER; note = N1-methylpseudouracil
  modified_base 604: mod_base = OTHER; note = N1-methylpseudouracil
  modified_base 605: mod_base = OTHER; note = N1-methylpseudouracil
  modified_base 608: mod_base = OTHER; note = N1-methylpseudouracil
  modified_base 620: mod_base = OTHER; note = N1-methylpseudouracil
  modified_base 628: mod_base = OTHER; note = N1-methylpseudouracil
  modified_base 629: mod_base = OTHER; note = N1-methylpseudouracil
  modified_base 632: mod_base = OTHER; note = N1-methylpseudouracil
  modified_base 645: mod_base = OTHER; note = N1-methylpseudouracil
  modified_base 653: mod_base = OTHER; note = N1-methylpseudouracil
  modified_base 664: mod_base = OTHER; note = N1-methylpseudouracil
  modified_base 674: mod_base = OTHER; note = N1-methylpseudouracil
  modified_base 678: mod_base = OTHER; note = N1-methylpseudouracil
  modified_base 679: mod_base = OTHER; note = N1-methylpseudouracil
  modified_base 682: mod_base = OTHER; note = N1-methylpseudouracil
  modified_base 683: mod_base = OTHER; note = N1-methylpseudouracil
  modified_base 685: mod_base = OTHER; note = N1-methylpseudouracil
  modified_base 689: mod_base = OTHER; note = N1-methylpseudouracil
  modified_base 697: mod_base = OTHER; note = N1-methylpseudouracil
  modified_base 698: mod_base = OTHER; note = N1-methylpseudouracil
  modified_base 703: mod_base = OTHER; note = N1-methylpseudouracil
  modified_base 704: mod_base = OTHER; note = N1-methylpseudouracil
  modified_base 713: mod_base = OTHER; note = N1-methylpseudouracil
  modified_base 716: mod_base = OTHER; note = N1-methylpseudouracil
  modified_base 722: mod_base = OTHER; note = N1-methylpseudouracil
  modified_base 742: mod_base = OTHER; note = N1-methylpseudouracil
  modified_base 743: mod_base = OTHER; note = N1-methylpseudouracil
  modified_base 752: mod_base = OTHER; note = N1-methylpseudouracil
  modified_base 755: mod_base = OTHER; note = N1-methylpseudouracil
  modified_base 770: mod_base = OTHER; note = N1-methylpseudouracil
  modified_base 782: mod_base = OTHER; note = N1-methylpseudouracil
  modified_base 798: mod_base = OTHER; note = N1-methylpseudouracil
  modified_base 802: mod_base = OTHER; note = N1-methylpseudouracil
  modified_base 803: mod_base = OTHER; note = N1-methylpseudouracil
  modified_base 810: mod_base = OTHER; note = N1-methylpseudouracil
  modified_base 812: mod_base = OTHER; note = N1-methylpseudouracil
  modified_base 815: mod_base = OTHER; note = N1-methylpseudouracil
  modified_base 827: mod_base = OTHER; note = N1-methylpseudouracil
  modified_base 829: mod_base = OTHER; note = N1-methylpseudouracil
  modified_base 842: mod_base = OTHER; note = N1-methylpseudouracil
  modified_base 847: mod_base = OTHER; note = N1-methylpseudouracil
  modified_base 863: mod_base = OTHER; note = N1-methylpseudouracil
  modified_base 869: mod_base = OTHER; note = N1-methylpseudouracil
  modified_base 872: mod_base = OTHER; note = N1-methylpseudouracil
  modified_base 875: mod_base = OTHER; note = N1-methylpseudouracil
  modified_base 877: mod_base = OTHER; note = N1-methylpseudouracil
  modified_base 878: mod_base = OTHER; note = N1-methylpseudouracil
  modified_base 881: mod_base = OTHER; note = N1-methylpseudouracil
  modified_base 883: mod_base = OTHER; note = N1-methylpseudouracil
  modified_base 895: mod_base = OTHER; note = N1-methylpseudouracil
  modified_base 901: mod_base = OTHER; note = N1-methylpseudouracil
  modified_base 902: mod_base = OTHER; note = N1-methylpseudouracil
  modified_base 908: mod_base = OTHER; note = N1-methylpseudouracil
  modified_base 920: mod_base = OTHER; note = N1-methylpseudouracil
  modified_base 927: mod_base = OTHER; note = N1-methylpseudouracil
  modified_base 929: mod_base = OTHER; note = N1-methylpseudouracil
  modified_base 932: mod_base = OTHER; note = N1-methylpseudouracil
  modified_base 935: mod_base = OTHER; note = N1-methylpseudouracil
  modified_base 939: mod_base = OTHER; note = N1-methylpseudouracil
  modified_base 950: mod_base = OTHER; note = N1-methylpseudouracil
  modified_base 952: mod_base = OTHER; note = N1-methylpseudouracil
  modified_base 959: mod_base = OTHER; note = N1-methylpseudouracil
  modified_base 976: mod_base = OTHER; note = N1-methylpseudouracil
  modified_base 983: mod_base = OTHER; note = N1-methylpseudouracil
  modified_base 992: mod_base = OTHER; note = N1-methylpseudouracil
  modified_base 995: mod_base = OTHER; note = N1-methylpseudouracil
  modified_base 1000: mod_base = OTHER; note = N1-methylpseudouracil
  modified_base 1010: mod_base = OTHER; note = N1-methylpseudouracil
  modified_base 1019: mod_base = OTHER; note = N1-methylpseudouracil
  modified_base 1022: mod_base = OTHER; note = N1-methylpseudouracil
  modified_base 1031: mod_base = OTHER; note = N1-methylpseudouracil
  modified_base 1034: mod_base = OTHER; note = N1-methylpseudouracil
  modified_base 1046: mod_base = OTHER; note = N1-methylpseudouracil
  modified_base 1049: mod_base = OTHER; note = N1-methylpseudouracil
  modified_base 1052: mod_base = OTHER; note = N1-methylpseudouracil
  modified_base 1055: mod_base = OTHER; note = N1-methylpseudouracil
  modified_base 1057: mod_base = OTHER; note = N1-methylpseudouracil
  modified_base 1058: mod_base = OTHER; note = N1-methylpseudouracil
  modified_base 1064: mod_base = OTHER; note = N1-methylpseudouracil
  modified_base 1079: mod_base = OTHER; note = N1-methylpseudouracil
  modified_base 1085: mod_base = OTHER; note = N1-methylpseudouracil
  modified_base 1087: mod_base = OTHER; note = N1-methylpseudouracil
  modified_base 1096: mod_base = OTHER; note = N1-methylpseudouracil
  modified_base 1106: mod_base = OTHER; note = N1-methylpseudouracil
  modified_base 1109: mod_base = OTHER; note = N1-methylpseudouracil
  modified_base 1110: mod_base = OTHER; note = N1-methylpseudouracil
  modified_base 1124: mod_base = OTHER; note = N1-methylpseudouracil
  modified_base 1128: mod_base = OTHER; note = N1-methylpseudouracil
  modified_base 1130: mod_base = OTHER; note = N1-methylpseudouracil
  modified_base 1133: mod_base = OTHER; note = N1-methylpseudouracil
  modified_base 1154: mod_base = OTHER; note = N1-methylpseudouracil
  modified_base 1157: mod_base = OTHER; note = N1-methylpseudouracil
  modified_base 1163: mod_base = OTHER; note = N1-methylpseudouracil
  modified_base 1166: mod_base = OTHER; note = N1-methylpseudouracil
  modified_base 1169: mod_base = OTHER; note = N1-methylpseudouracil
  modified_base 1171: mod_base = OTHER; note = N1-methylpseudouracil
  modified_base 1177: mod_base = OTHER; note = N1-methylpseudouracil
  modified_base 1187: mod_base = OTHER; note = N1-methylpseudouracil
  modified_base 1199: mod_base = OTHER; note = N1-methylpseudouracil
  modified_base 1205: mod_base = OTHER; note = N1-methylpseudouracil
  modified_base 1211: mod_base = OTHER; note = N1-methylpseudouracil
  modified_base 1214: mod_base = OTHER; note = N1-methylpseudouracil
  modified_base 1232: mod_base = OTHER; note = N1-methylpseudouracil
  modified_base 1238: mod_base = OTHER; note = N1-methylpseudouracil
  modified_base 1240: mod_base = OTHER; note = N1-methylpseudouracil
  modified_base 1243: mod_base = OTHER; note = N1-methylpseudouracil
  modified_base 1244: mod_base = OTHER; note = N1-methylpseudouracil
  modified_base 1253: mod_base = OTHER; note = N1-methylpseudouracil
  modified_base 1255: mod_base = OTHER; note = N1-methylpseudouracil
  modified_base 1271: mod_base = OTHER; note = N1-methylpseudouracil
  modified_base 1273: mod_base = OTHER; note = N1-methylpseudouracil
  modified_base 1274: mod_base = OTHER; note = N1-methylpseudouracil
  modified_base 1291: mod_base = OTHER; note = N1-methylpseudouracil
  modified_base 1301: mod_base = OTHER; note = N1-methylpseudouracil
  modified_base 1307: mod_base = OTHER; note = N1-methylpseudouracil
  modified_base 1324: mod_base = OTHER; note = N1-methylpseudouracil
  modified_base 1325: mod_base = OTHER; note = N1-methylpseudouracil
  modified_base 1331: mod_base = OTHER; note = N1-methylpseudouracil
  modified_base 1337: mod_base = OTHER; note = N1-methylpseudouracil
  modified_base 1343: mod_base = OTHER; note = N1-methylpseudouracil
  modified_base 1347: mod_base = OTHER; note = N1-methylpseudouracil
  modified_base 1351: mod_base = OTHER; note = N1-methylpseudouracil
  modified_base 1353: mod_base = OTHER; note = N1-methylpseudouracil
  modified_base 1373: mod_base = OTHER; note = N1-methylpseudouracil
  modified_base 1376: mod_base = OTHER; note = N1-methylpseudouracil
  modified_base 1379: mod_base = OTHER; note = N1-methylpseudouracil
  modified_base 1388: mod_base = OTHER; note = N1-methylpseudouracil
  modified_base 1394: mod_base = OTHER; note = N1-methylpseudouracil
  modified_base 1406: mod_base = OTHER; note = N1-methylpseudouracil
  modified_base 1412: mod_base = OTHER; note = N1-methylpseudouracil
  modified_base 1415: mod_base = OTHER; note = N1-methylpseudouracil
  modified_base 1418: mod_base = OTHER; note = N1-methylpseudouracil
  modified_base 1420: mod_base = OTHER; note = N1-methylpseudouracil
  modified_base 1422: mod_base = OTHER; note = N1-methylpseudouracil
  modified_base 1429: mod_base = OTHER; note = N1-methylpseudouracil
  modified_base 1435: mod_base = OTHER; note = N1-methylpseudouracil
  modified_base 1441: mod_base = OTHER; note = N1-methylpseudouracil
  modified_base 1454: mod_base = OTHER; note = N1-methylpseudouracil
  modified_base 1460: mod_base = OTHER; note = N1-methylpseudouracil
  modified_base 1465: mod_base = OTHER; note = N1-methylpseudouracil
  modified_base 1467: mod_base = OTHER; note = N1-methylpseudouracil
  modified_base 1474: mod_base = OTHER; note = N1-methylpseudouracil
  modified_base 1494: mod_base = OTHER; note = N1-methylpseudouracil
  modified_base 1495: mod_base = OTHER; note = N1-methylpseudouracil
  modified_base 1496: mod_base = OTHER; note = N1-methylpseudouracil
  modified_base 1501: mod_base = OTHER; note = N1-methylpseudouracil
  modified_base 1503: mod_base = OTHER; note = N1-methylpseudouracil
  modified_base 1508: mod_base = OTHER; note = N1-methylpseudouracil
  modified_base 1510: mod_base = OTHER; note = N1-methylpseudouracil
  modified_base 1512: mod_base = OTHER; note = N1-methylpseudouracil
  modified_base 1516: mod_base = OTHER; note = N1-methylpseudouracil
  modified_base 1527: mod_base = OTHER; note = N1-methylpseudouracil
  modified_base 1532: mod_base = OTHER; note = N1-methylpseudouracil
  modified_base 1543: mod_base = OTHER; note = N1-methylpseudouracil
  modified_base 1545: mod_base = OTHER; note = N1-methylpseudouracil
  modified_base 1549: mod_base = OTHER; note = N1-methylpseudouracil
  modified_base 1562: mod_base = OTHER; note = N1-methylpseudouracil
  modified_base 1565: mod_base = OTHER; note = N1-methylpseudouracil
  modified_base 1579: mod_base = OTHER; note = N1-methylpseudouracil
  modified_base 1606: mod_base = OTHER; note = N1-methylpseudouracil
  modified_base 1608: mod_base = OTHER; note = N1-methylpseudouracil
  modified_base 1609: mod_base = OTHER; note = N1-methylpseudouracil
  modified_base 1614: mod_base = OTHER; note = N1-methylpseudouracil
  modified_base 1624: mod_base = OTHER; note = N1-methylpseudouracil
  modified_base 1627: mod_base = OTHER; note = N1-methylpseudouracil
  modified_base 1630: mod_base = OTHER; note = N1-methylpseudouracil
  modified_base 1639: mod_base = OTHER; note = N1-methylpseudouracil
  modified_base 1643: mod_base = OTHER; note = N1-methylpseudouracil
  modified_base 1645: mod_base = OTHER; note = N1-methylpseudouracil
  modified_base 1647: mod_base = OTHER; note = N1-methylpseudouracil
  modified_base 1652: mod_base = OTHER; note = N1-methylpseudouracil
  modified_base 1660: mod_base = OTHER; note = N1-methylpseudouracil
  modified_base 1670: mod_base = OTHER; note = N1-methylpseudouracil
  modified_base 1672: mod_base = OTHER; note = N1-methylpseudouracil
  modified_base 1681: mod_base = OTHER; note = N1-methylpseudouracil
  modified_base 1684: mod_base = OTHER; note = N1-methylpseudouracil
  modified_base 1690: mod_base = OTHER; note = N1-methylpseudouracil
  modified_base 1699: mod_base = OTHER; note = N1-methylpseudouracil
  modified_base 1700: mod_base = OTHER; note = N1-methylpseudouracil
  modified_base 1702: mod_base = OTHER; note = N1-methylpseudouracil
  modified_base 1705: mod_base = OTHER; note = N1-methylpseudouracil
  modified_base 1709: mod_base = OTHER; note = N1-methylpseudouracil
  modified_base 1724: mod_base = OTHER; note = N1-methylpseudouracil
  modified_base 1727: mod_base = OTHER; note = N1-methylpseudouracil
  modified_base 1729: mod_base = OTHER; note = N1-methylpseudouracil
  modified_base 1731: mod_base = OTHER; note = N1-methylpseudouracil
  modified_base 1747: mod_base = OTHER; note = N1-methylpseudouracil
  modified_base 1753: mod_base = OTHER; note = N1-methylpseudouracil
  modified_base 1762: mod_base = OTHER; note = N1-methylpseudouracil
  modified_base 1766: mod_base = OTHER; note = N1-methylpseudouracil
  modified_base 1768: mod_base = OTHER; note = N1-methylpseudouracil
  modified_base 1776: mod_base = OTHER; note = N1-methylpseudouracil
  modified_base 1780: mod_base = OTHER; note = N1-methylpseudouracil
  modified_base 1792: mod_base = OTHER; note = N1-methylpseudouracil
  modified_base 1795: mod_base = OTHER; note = N1-methylpseudouracil
  modified_base 1801: mod_base = OTHER; note = N1-methylpseudouracil
  modified_base 1810: mod_base = OTHER; note = N1-methylpseudouracil
  modified_base 1819: mod_base = OTHER; note = N1-methylpseudouracil
  modified_base 1821: mod_base = OTHER; note = N1-methylpseudouracil
  modified_base 1822: mod_base = OTHER; note = N1-methylpseudouracil
  modified_base 1826: mod_base = OTHER; note = N1-methylpseudouracil
  modified_base 1828: mod_base = OTHER; note = N1-methylpseudouracil
  modified_base 1841: mod_base = OTHER; note = N1-methylpseudouracil
  modified_base 1844: mod_base = OTHER; note = N1-methylpseudouracil
  modified_base 1846: mod_base = OTHER; note = N1-methylpseudouracil
  modified_base 1848: mod_base = OTHER; note = N1-methylpseudouracil
  modified_base 1849: mod_base = OTHER; note = N1-methylpseudouracil
  modified_base 1863: mod_base = OTHER; note = N1-methylpseudouracil
  modified_base 1864: mod_base = OTHER; note = N1-methylpseudouracil
  modified_base 1868: mod_base = OTHER; note = N1-methylpseudouracil
  modified_base 1870: mod_base = OTHER; note = N1-methylpseudouracil
  modified_base 1879: mod_base = OTHER; note = N1-methylpseudouracil
  modified_base 1883: mod_base = OTHER; note = N1-methylpseudouracil
  modified_base 1885: mod_base = OTHER; note = N1-methylpseudouracil
  modified_base 1896: mod_base = OTHER; note = N1-methylpseudouracil
  modified_base 1903: mod_base = OTHER; note = N1-methylpseudouracil
  modified_base 1908: mod_base = OTHER; note = N1-methylpseudouracil
  modified_base 1911: mod_base = OTHER; note = N1-methylpseudouracil
  modified_base 1915: mod_base = OTHER; note = N1-methylpseudouracil
  modified_base 1924: mod_base = OTHER; note = N1-methylpseudouracil
  modified_base 1933: mod_base = OTHER; note = N1-methylpseudouracil
  modified_base 1935: mod_base = OTHER; note = N1-methylpseudouracil
  modified_base 1945: mod_base = OTHER; note = N1-methylpseudouracil
  modified_base 1960: mod_base = OTHER; note = N1-methylpseudouracil
  modified_base 1962: mod_base = OTHER; note = N1-methylpseudouracil
  modified_base 1963: mod_base = OTHER; note = N1-methylpseudouracil
  modified_base 1967: mod_base = OTHER; note = N1-methylpseudouracil
  modified_base 1972: mod_base = OTHER; note = N1-methylpseudouracil
  modified_base 1979: mod_base = OTHER; note = N1-methylpseudouracil
  modified_base 1981: mod_base = OTHER; note = N1-methylpseudouracil
  modified_base 1998: mod_base = OTHER; note = N1-methylpseudouracil
  modified_base 2008: mod_base = OTHER; note = N1-methylpseudouracil
  modified_base 2012: mod_base = OTHER; note = N1-methylpseudouracil
  modified_base 2020: mod_base = OTHER; note = N1-methylpseudouracil
  modified_base 2027: mod_base = OTHER; note = N1-methylpseudouracil
  modified_base 2042: mod_base = OTHER; note = N1-methylpseudouracil
  modified_base 2046: mod_base = OTHER; note = N1-methylpseudouracil
  modified_base 2059: mod_base = OTHER; note = N1-methylpseudouracil
  modified_base 2060: mod_base = OTHER; note = N1-methylpseudouracil
  modified_base 2062: mod_base = OTHER; note = N1-methylpseudouracil
  modified_base 2078: mod_base = OTHER; note = N1-methylpseudouracil
  modified_base 2080: mod_base = OTHER; note = N1-methylpseudouracil
  modified_base 2083: mod_base = OTHER; note = N1-methylpseudouracil
  modified_base 2086: mod_base = OTHER; note = N1-methylpseudouracil
  modified_base 2090: mod_base = OTHER; note = N1-methylpseudouracil
  modified_base 2107: mod_base = OTHER; note = N1-methylpseudouracil
  modified_base 2111: mod_base = OTHER; note = N1-methylpseudouracil
  modified_base 2114: mod_base = OTHER; note = N1-methylpseudouracil
  modified_base 2119: mod_base = OTHER; note = N1-methylpseudouracil
  modified_base 2120: mod_base = OTHER; note = N1-methylpseudouracil
  modified_base 2123: mod_base = OTHER; note = N1-methylpseudouracil
  modified_base 2126: mod_base = OTHER; note = N1-methylpseudouracil
  modified_base 2153: mod_base = OTHER; note = N1-methylpseudouracil
  modified_base 2156: mod_base = OTHER; note = N1-methylpseudouracil
  modified_base 2161: mod_base = OTHER; note = N1-methylpseudouracil
  modified_base 2165: mod_base = OTHER; note = N1-methylpseudouracil
  modified_base 2179: mod_base = OTHER; note = N1-methylpseudouracil
  modified_base 2193: mod_base = OTHER; note = N1-methylpseudouracil
  modified_base 2198: mod_base = OTHER; note = N1-methylpseudouracil
  modified_base 2204: mod_base = OTHER; note = N1-methylpseudouracil
  modified_base 2207: mod_base = OTHER; note = N1-methylpseudouracil
  modified_base 2210: mod_base = OTHER; note = N1-methylpseudouracil
  modified_base 2213: mod_base = OTHER; note = N1-methylpseudouracil
  modified_base 2219: mod_base = OTHER; note = N1-methylpseudouracil
  modified_base 2225: mod_base = OTHER; note = N1-methylpseudouracil
  modified_base 2231: mod_base = OTHER; note = N1-methylpseudouracil
  modified_base 2234: mod_base = OTHER; note = N1-methylpseudouracil
  modified_base 2237: mod_base = OTHER; note = N1-methylpseudouracil
  modified_base 2240: mod_base = OTHER; note = N1-methylpseudouracil
  modified_base 2246: mod_base = OTHER; note = N1-methylpseudouracil
  modified_base 2249: mod_base = OTHER; note = N1-methylpseudouracil
  modified_base 2252: mod_base = OTHER; note = N1-methylpseudouracil
  modified_base 2255: mod_base = OTHER; note = N1-methylpseudouracil
  modified_base 2257: mod_base = OTHER; note = N1-methylpseudouracil
  modified_base 2261: mod_base = OTHER; note = N1-methylpseudouracil
  modified_base 2263: mod_base = OTHER; note = N1-methylpseudouracil
  modified_base 2270: mod_base = OTHER; note = N1-methylpseudouracil
  modified_base 2273: mod_base = OTHER; note = N1-methylpseudouracil
  modified_base 2276: mod_base = OTHER; note = N1-methylpseudouracil
  modified_base 2278: mod_base = OTHER; note = N1-methylpseudouracil
  modified_base 2281: mod_base = OTHER; note = N1-methylpseudouracil
  modified_base 2282: mod_base = OTHER; note = N1-methylpseudouracil
  modified_base 2300: mod_base = OTHER; note = N1-methylpseudouracil
  modified_base 2308: mod_base = OTHER; note = N1-methylpseudouracil
  modified_base 2309: mod_base = OTHER; note = N1-methylpseudouracil
  modified_base 2323: mod_base = OTHER; note = N1-methylpseudouracil
  modified_base 2325: mod_base = OTHER; note = N1-methylpseudouracil
  modified_base 2335: mod_base = OTHER; note = N1-methylpseudouracil
  modified_base 2355: mod_base = OTHER; note = N1-methylpseudouracil
  modified_base 2357: mod_base = OTHER; note = N1-methylpseudouracil
  modified_base 2359: mod_base = OTHER; note = N1-methylpseudouracil
  modified_base 2368: mod_base = OTHER; note = N1-methylpseudouracil
  modified_base 2380: mod_base = OTHER; note = N1-methylpseudouracil
  modified_base 2381: mod_base = OTHER; note = N1-methylpseudouracil
  modified_base 2390: mod_base = OTHER; note = N1-methylpseudouracil
  modified_base 2395: mod_base = OTHER; note = N1-methylpseudouracil
  modified_base 2420: mod_base = OTHER; note = N1-methylpseudouracil
  modified_base 2426: mod_base = OTHER; note = N1-methylpseudouracil
  modified_base 2428: mod_base = OTHER; note = N1-methylpseudouracil
  modified_base 2437: mod_base = OTHER; note = N1-methylpseudouracil
  modified_base 2439: mod_base = OTHER; note = N1-methylpseudouracil
  modified_base 2450: mod_base = OTHER; note = N1-methylpseudouracil
  modified_base 2457: mod_base = OTHER; note = N1-methylpseudouracil
  modified_base 2462: mod_base = OTHER; note = N1-methylpseudouracil
  modified_base 2465: mod_base = OTHER; note = N1-methylpseudouracil
  modified_base 2471: mod_base = OTHER; note = N1-methylpseudouracil
  modified_base 2476: mod_base = OTHER; note = N1-methylpseudouracil
  modified_base 2482: mod_base = OTHER; note = N1-methylpseudouracil
  modified_base 2485: mod_base = OTHER; note = N1-methylpseudouracil
  modified_base 2488: mod_base = OTHER; note = N1-methylpseudouracil
  modified_base 2493: mod_base = OTHER; note = N1-methylpseudouracil
  modified_base 2500: mod_base = OTHER; note = N1-methylpseudouracil
  modified_base 2504: mod_base = OTHER; note = N1-methylpseudouracil
  modified_base 2509: mod_base = OTHER; note = N1-methylpseudouracil
  modified_base 2513: mod_base = OTHER; note = N1-methylpseudouracil
  modified_base 2514: mod_base = OTHER; note = N1-methylpseudouracil
  modified_base 2516: mod_base = OTHER; note = N1-methylpseudouracil
  modified_base 2517: mod_base = OTHER; note = N1-methylpseudouracil
  modified_base 2523: mod_base = OTHER; note = N1-methylpseudouracil
  modified_base 2524: mod_base = OTHER; note = N1-methylpseudouracil
  modified_base 2530: mod_base = OTHER; note = N1-methylpseudouracil
  modified_base 2543: mod_base = OTHER; note = N1-methylpseudouracil
  modified_base 2546: mod_base = OTHER; note = N1-methylpseudouracil
  modified_base 2551: mod_base = OTHER; note = N1-methylpseudouracil
  modified_base 2552: mod_base = OTHER; note = N1-methylpseudouracil
  modified_base 2555: mod_base = OTHER; note = N1-methylpseudouracil
  modified_base 2563: mod_base = OTHER; note = N1-methylpseudouracil
  modified_base 2579: mod_base = OTHER; note = N1-methylpseudouracil
  modified_base 2580: mod_base = OTHER; note = N1-methylpseudouracil
  modified_base 2582: mod_base = OTHER; note = N1-methylpseudouracil
  modified_base 2588: mod_base = OTHER; note = N1-methylpseudouracil
  modified_base 2593: mod_base = OTHER; note = N1-methylpseudouracil
  modified_base 2596: mod_base = OTHER; note = N1-methylpseudouracil
  modified_base 2598: mod_base = OTHER; note = N1-methylpseudouracil
  modified_base 2599: mod_base = OTHER; note = N1-methylpseudouracil
  modified_base 2600: mod_base = OTHER; note = N1-methylpseudouracil
  modified_base 2604: mod_base = OTHER; note = N1-methylpseudouracil
  modified_base 2609: mod_base = OTHER; note = N1-methylpseudouracil
  modified_base 2611: mod_base = OTHER; note = N1-methylpseudouracil
  modified_base 2615: mod_base = OTHER; note = N1-methylpseudouracil
ggaaatcgcaaaatttgctcttcgcgttagatttcttttagttttctcgcaactagcaagctttttgttctcgccatggggatcgagctgctgtgcctgttcttcctgttcctgggacggaacgaccacgtgcagggtggctgcgcccttggtggggcagagacctgcgaggactgcctgctcatcggcccacagtgcgcctggtgcgctcaggagaacttcacccaccccagcggagtgggcgagaggtgcgacaccccggccaacctgctggccaaggggtgccagctgaacttcatcgagaaccccgtctctcaggtggagatcctgaagaacaagcccctcagcgttgggcggcagaagaacagctctgacatcgtgcagatcgcgccccagagcctgatcctgaaactacggcctggcggtgcgcaaaccctgcaggtccacgtgcggcagaccgaggactaccctgtggacctgtactacctgatggacctctccgccagcatggacgacgatctgaacaccatcaaggagctgggcagccgcctgagcaaggagatgtccaagctgacctccaacttccgcctggggttcggatccttcgtggagaagcccgtgagccccttcgtgaagaccacccctgaggagatcgccaacccctgcagcagcatcccttacttctgcctgcccaccttcggcttcaagcacatcctgccactgaccaacgacgccgagcggttcaacgagatcgtgaagaaccagaagatcagcgccaacatcgacgccccggagggtgggttcgacgctatcatgcaggccgccgtgtgcaaggagaagatcggctggcgcaacgacagcctgcacctgctggtgttcgtgtccgacgccgactcccacttcggcatggacagcaagctggccggtatcgtgatccctaacgacggcctgtgccacctggacagcaagaacgagtacagcatgagcaccgtgctggagtaccccaccatcggccagctgatcgacaagctggtgcagaacaacgtgctgctgatcttcgccgtgacccaggagcaggtgcacctctacgagaactacgccaagctgattccaggcgccaccgtcggtctgctgcagaaggacagcggcaacatcctgcagctgatcatctccgcctacgaggagctgaggagcgaggtggagctggaggtgctcggggacaccgagggcctgaacctgtccttcaccgccatctgcaacaacgggaccctcttccagcaccagaagaagtgcagccacatgaaggtgggcgacaccgccagcttcagcgtcaccgtgaacatacctcactgtgagcggcggagcaggcacatcatcatcaagcccgtgggcctgggagacgccctggagctgctggtgtctcccgagtgcaactgcgactgccagaaggaggtggaggtgaactctagcaagtgccaccacggcaacgggagtttccagtgtggcgtgtgtgcctgccaccccggtcacatgggaccccggtgtgagtgcggggaggacatgctgagcaccgacagctgcaaggaggccccagaccacccgagctgttccggtcggggcgactgctactgcggccagtgcatctgtcacctgagcccctacggcaacatctacgggccctactgccagtgcgacaacttctcctgcgtgcgccacaaaggcctgctgtgtggcggcaacggcgactgcgactgcggggagtgcgtgtgccgcagtgggtggaccggcgagtactgcaactgcaccacctccaccgactcttgcgtgtccgaggacggggtgctgtgttccgggcgcggagattgcgtgtgcgggaagtgcgtgtgcaccaaccctggcgcatcgggtcctacctgcgagaggtgccccacctgtggcgacccctgcaacagcaagcgctcttgcatcgagtgccacctctcagcagcagggcaggctcgggaggagtgcgtggacaagtgcaagctcgccggcgccaccatcagtgaggaggaggacttctccaaggacggcagcgtgtcctgctccctccagggcgagaacgagtgcctcatcaccttcctgatcaccaccgacaacgagggcaagaccatcatccactccatcaacgagaaggactgccccaagccgcctaacatccccatgatcatgctgggcgtgagcctggccatcctgctgatcggcgtggtgctgctgtgcatctggaagctgctggtctccttccacgaccgcaaggaggtggccaagttcgaggccgagcgctctaaggccaagtggcagaccggcaccaaccctctgtaccggggctccaccagcaccttcaagaacgtgacctacaagcaccgcgagaagcagaaggtggacctgtccaccgactgtggcaagcccatccccaatcccctgctggggctggactccacctgataataggctggagcctcggtggcctagcttcttgccccttgggcctccccccagcccctcctccccttcctgcacccgtaccccccaaacaccattgtcacactccagtggtctttgaataaagtctgagtgggcggc

SEQ ID NO: 171 - RNA, 2622 nt, unidentified
  source 1..2622: mol_type = unassigned RNA
  modified_base 6: mod_base = OTHER; note = N1-methylpseudouracil
  modified_base 14: mod_base = OTHER; note = N1-methylpseudouracil
  modified_base 15: mod_base = OTHER; note = N1-methylpseudouracil
  modified_base 16: mod_base = OTHER; note = N1-methylpseudouracil
  modified_base 19: mod_base = OTHER; note = N1-methylpseudouracil
  modified_base 21: mod_base = OTHER; note = N1-methylpseudouracil
  modified_base 22: mod_base = OTHER; note = N1-methylpseudouracil
  modified_base 27: mod_base = OTHER; note = N1-methylpseudouracil
  modified_base 28: mod_base = OTHER; note = N1-methylpseudouracil
  modified_base 32: mod_base = OTHER; note = N1-methylpseudouracil
  modified_base 33: mod_base = OTHER; note = N1-methylpseudouracil
  modified_base 34: mod_base = OTHER; note = N1-methylpseudouracil
  modified_base 36: mod_base = OTHER; note = N1-methylpseudouracil
  modified_base 37: mod_base = OTHER; note = N1-methylpseudouracil
  modified_base 38: mod_base = OTHER; note = N1-methylpseudouracil
  modified_base 39: mod_base = OTHER; note = N1-methylpseudouracil
  modified_base 42: mod_base = OTHER; note = N1-methylpseudouracil
  modified_base 43: mod_base = OTHER; note = N1-methylpseudouracil
  modified_base 44: mod_base = OTHER; note = N1-methylpseudouracil
  modified_base 45: mod_base = OTHER; note = N1-methylpseudouracil
  modified_base 47: mod_base = OTHER; note = N1-methylpseudouracil
  modified_base 54: mod_base = OTHER; note = N1-methylpseudouracil
  modified_base 62: mod_base = OTHER; note = N1-methylpseudouracil
  modified_base 63: mod_base = OTHER; note = N1-methylpseudouracil
  modified_base 64: mod_base = OTHER; note = N1-methylpseudouracil
  modified_base 65: mod_base = OTHER; note = N1-methylpseudouracil
  modified_base 66: mod_base = OTHER; note = N1-methylpseudouracil
  modified_base 68: mod_base = OTHER; note = N1-methylpseudouracil
  modified_base 69: mod_base = OTHER; note = N1-methylpseudouracil
  modified_base 71: mod_base = OTHER; note = N1-methylpseudouracil
  modified_base 77: mod_base = OTHER; note = N1-methylpseudouracil
  modified_base 83: mod_base = OTHER; note = N1-methylpseudouracil
  modified_base 89: mod_base = OTHER; note = N1-methylpseudouracil
  modified_base 92: mod_base = OTHER; note = N1-methylpseudouracil
  modified_base 94: mod_base = OTHER; note = N1-methylpseudouracil
  modified_base 98: mod_base = OTHER; note = N1-methylpseudouracil
  modified_base 100: mod_base = OTHER; note = N1-methylpseudouracil
  modified_base 101: mod_base = OTHER; note = N1-methylpseudouracil
  modified_base 103: mod_base = OTHER; note = N1-methylpseudouracil
  modified_base 104: mod_base = OTHER; note = N1-methylpseudouracil
  modified_base 107: mod_base = OTHER; note = N1-methylpseudouracil
  modified_base 109: mod_base = OTHER; note = N1-methylpseudouracil
  modified_base 110: mod_base = OTHER; note = N1-methylpseudouracil
  modified_base 113: mod_base = OTHER; note = N1-methylpseudouracil
  modified_base 131: mod_base = OTHER; note = N1-methylpseudouracil
  modified_base 138: mod_base = OTHER; note = N1-methylpseudouracil
  modified_base 142: mod_base = OTHER; note = N1-methylpseudouracil
  modified_base 149: mod_base = OTHER; note = N1-methylpseudouracil
  modified_base 150: mod_base = OTHER; note = N1-methylpseudouracil
  modified_base 153: mod_base = OTHER; note = N1-methylpseudouracil
  modified_base 166: mod_base = OTHER; note = N1-methylpseudouracil
  modified_base 175: mod_base = OTHER; note = N1-methylpseudouracil
  modified_base 179: mod_base = OTHER; note = N1-methylpseudouracil
  modified_base 182: mod_base = OTHER; note = N1-methylpseudouracil
  modified_base 185: mod_base = OTHER; note = N1-methylpseudouracil
  modified_base 196: mod_base = OTHER; note = N1-methylpseudouracil
  modified_base 202: mod_base = OTHER; note = N1-methylpseudouracil
  modified_base 205: mod_base = OTHER; note = N1-methylpseudouracil
  modified_base 210: mod_base = OTHER; note = N1-methylpseudouracil
  modified_base 220: mod_base = OTHER; note = N1-methylpseudouracil
  modified_base 221: mod_base = OTHER; note = N1-methylpseudouracil
  modified_base 239: mod_base = OTHER; note = N1-methylpseudouracil
  modified_base 250: mod_base = OTHER; note = N1-methylpseudouracil
  modified_base 269: mod_base = OTHER; note = N1-methylpseudouracil
  modified_base 272: mod_base = OTHER; note = N1-methylpseudouracil
  modified_base 283: mod_base = OTHER; note = N1-methylpseudouracil
  modified_base 290: mod_base = OTHER; note = N1-methylpseudouracil
  modified_base 295: mod_base = OTHER; note = N1-methylpseudouracil
  modified_base 296: mod_base = OTHER; note = N1-methylpseudouracil
  modified_base 299: mod_base = OTHER; note = N1-methylpseudouracil
  modified_base 311: mod_base = OTHER; note = N1-methylpseudouracil
  modified_base 313: mod_base = OTHER; note = N1-methylpseudouracil
  modified_base 315: mod_base = OTHER; note = N1-methylpseudouracil
  modified_base 320: mod_base = OTHER; note = N1-methylpseudouracil
  modified_base 326: mod_base = OTHER; note = N1-methylpseudouracil
  modified_base 329: mod_base = OTHER; note = N1-methylpseudouracil
  modified_base 344: mod_base = OTHER; note = N1-methylpseudouracil
  modified_base 350: mod_base = OTHER; note = N1-methylpseudouracil
  modified_base 351: mod_base = OTHER; note = N1-methylpseudouracil
  modified_base 370: mod_base = OTHER; note = N1-methylpseudouracil
  modified_base 372: mod_base = OTHER; note = N1-methylpseudouracil
  modified_base 377: mod_base = OTHER; note = N1-methylpseudouracil
  modified_base 380: mod_base = OTHER; note = N1-methylpseudouracil
  modified_base 386: mod_base = OTHER; note = N1-methylpseudouracil
  modified_base 401: mod_base = OTHER; note = N1-methylpseudouracil
  modified_base 404: mod_base = OTHER; note = N1-methylpseudouracil
  modified_base 407: mod_base = OTHER; note = N1-methylpseudouracil
  modified_base 413: mod_base = OTHER; note = N1-methylpseudouracil
  modified_base 420: mod_base = OTHER; note = N1-methylpseudouracil
  modified_base 426: mod_base = OTHER; note = N1-methylpseudouracil
  modified_base 437: mod_base = OTHER; note = N1-methylpseudouracil
  modified_base 443: mod_base = OTHER; note = N1-methylpseudouracil
  modified_base 449: mod_base = OTHER; note = N1-methylpseudouracil
  modified_base 466: mod_base = OTHER; note = N1-methylpseudouracil
  modified_base 471: mod_base = OTHER; note = N1-methylpseudouracil
  modified_base 473: mod_base = OTHER; note = N1-methylpseudouracil
  modified_base 479: mod_base = OTHER; note = N1-methylpseudouracil
  modified_base 481: mod_base = OTHER; note = N1-methylpseudouracil
  modified_base 484: mod_base = OTHER; note = N1-methylpseudouracil
  modified_base 488: mod_base = OTHER; note = N1-methylpseudouracil
  modified_base 491: mod_base = OTHER; note = N1-methylpseudouracil
  modified_base 497: mod_base = OTHER; note = N1-methylpseudouracil
  modified_base 499: mod_base = OTHER; note = N1-methylpseudouracil
  modified_base 502: mod_base = OTHER; note = N1-methylpseudouracil
  modified_base 509: mod_base = OTHER; note = N1-methylpseudouracil
  modified_base 519: mod_base = OTHER; note = N1-methylpseudouracil
  modified_base 521: mod_base = OTHER; note = N1-methylpseudouracil
  modified_base 530: mod_base = OTHER; note = N1-methylpseudouracil
  modified_base 539: mod_base = OTHER; note = N1-methylpseudouracil
  modified_base 551: mod_base = OTHER; note = N1-methylpseudouracil
  modified_base 563: mod_base = OTHER; note = N1-methylpseudouracil
  modified_base 565: mod_base = OTHER; note = N1-methylpseudouracil
  modified_base 572: mod_base = OTHER; note = N1-methylpseudouracil
  modified_base 577: mod_base = OTHER; note = N1-methylpseudouracil
  modified_base 583: mod_base = OTHER; note = N1-methylpseudouracil
  modified_base 584: mod_base = OTHER; note = N1-methylpseudouracil
  modified_base 590: mod_base = OTHER; note = N1-methylpseudouracil
  modified_base 595: mod_base = OTHER; note = N1-methylpseudouracil
  modified_base 596: mod_base = OTHER; note = N1-methylpseudouracil
  modified_base 601: mod_base = OTHER; note = N1-methylpseudouracil
  modified_base 604: mod_base = OTHER; note = N1-methylpseudouracil
  modified_base 605: mod_base = OTHER; note = N1-methylpseudouracil
  modified_base 608: mod_base = OTHER; note = N1-methylpseudouracil
  modified_base 620: mod_base = OTHER; note = N1-methylpseudouracil
  modified_base 628: mod_base = OTHER; note = N1-methylpseudouracil
  modified_base 629: mod_base = OTHER; note = N1-methylpseudouracil
  modified_base 632: mod_base = OTHER; note = N1-methylpseudouracil
  modified_base 645: mod_base = OTHER; note = N1-methylpseudouracil
  modified_base 653: mod_base = OTHER; note = N1-methylpseudouracil
  modified_base 664: mod_base = OTHER; note = N1-methylpseudouracil
  modified_base 674: mod_base = OTHER; note = N1-methylpseudouracil
  modified_base 678: mod_base = OTHER; note = N1-methylpseudouracil
  modified_base 679: mod_base = OTHER; note = N1-methylpseudouracil
  modified_base 682: mod_base = OTHER; note = N1-methylpseudouracil
  modified_base 683: mod_base = OTHER; note = N1-methylpseudouracil
  modified_base 685: mod_base = OTHER; note = N1-methylpseudouracil
  modified_base 689: mod_base = OTHER; note = N1-methylpseudouracil
  modified_base 697: mod_base = OTHER; note = N1-methylpseudouracil
  modified_base 698: mod_base = OTHER; note = N1-methylpseudouracil
  modified_base 703: mod_base = OTHER; note = N1-methylpseudouracil
  modified_base 704: mod_base = OTHER; note = N1-methylpseudouracil
  modified_base 713: mod_base = OTHER; note = N1-methylpseudouracil
  modified_base 716: mod_base = OTHER; note = N1-methylpseudouracil
  modified_base 722: mod_base = OTHER; note = N1-methylpseudouracil
  modified_base 742: mod_base = OTHER; note = N1-methylpseudouracil
  modified_base 743: mod_base = OTHER; note = N1-methylpseudouracil
  modified_base 752: mod_base = OTHER; note = N1-methylpseudouracil
  modified_base 755: mod_base = OTHER; note = N1-methylpseudouracil
  modified_base 770: mod_base = OTHER; note = N1-methylpseudouracil
  modified_base 782: mod_base = OTHER; note = N1-methylpseudouracil
  modified_base 798: mod_base = OTHER; note = N1-methylpseudouracil
  modified_base 802: mod_base = OTHER; note = N1-methylpseudouracil
  modified_base 803: mod_base = OTHER; note = N1-methylpseudouracil
  modified_base 810: mod_base = OTHER; note = N1-methylpseudouracil
  modified_base 812: mod_base = OTHER; note = N1-methylpseudouracil
  modified_base 815: mod_base = OTHER; note = N1-methylpseudouracil
  modified_base 827: mod_base = OTHER; note = N1-methylpseudouracil
  modified_base 829: mod_base = OTHER; note = N1-methylpseudouracil
  modified_base 842: mod_base = OTHER; note = N1-methylpseudouracil
  modified_base 847: mod_base = OTHER; note = N1-methylpseudouracil
  modified_base 863: mod_base = OTHER; note = N1-methylpseudouracil
  modified_base 869: mod_base = OTHER; note = N1-methylpseudouracil
  modified_base 872: mod_base = OTHER; note = N1-methylpseudouracil
  modified_base 875: mod_base = OTHER; note = N1-methylpseudouracil
  modified_base 877: mod_base = OTHER; note = N1-methylpseudouracil
  modified_base 878: mod_base = OTHER; note = N1-methylpseudouracil
  modified_base 881: mod_base = OTHER; note = N1-methylpseudouracil
  modified_base 883: mod_base = OTHER; note = N1-methylpseudouracil
  modified_base 895: mod_base = OTHER; note = N1-methylpseudouracil
  modified_base 901: mod_base = OTHER; note = N1-methylpseudouracil
  modified_base 902: mod_base = OTHER; note = N1-methylpseudouracil
  modified_base 908: mod_base = OTHER; note = N1-methylpseudouracil
  modified_base 920: mod_base = OTHER; note = N1-methylpseudouracil
  modified_base 927: mod_base = OTHER; note = N1-methylpseudouracil
  modified_base 929: mod_base = OTHER; note = N1-methylpseudouracil
  modified_base 932: mod_base = OTHER; note = N1-methylpseudouracil
  modified_base 935: mod_base = OTHER; note = N1-methylpseudouracil
  modified_base 939: mod_base = OTHER; note = N1-methylpseudouracil
  modified_base 950: mod_base = OTHER; note = N1-methylpseudouracil
  modified_base 952: mod_base = OTHER; note = N1-methylpseudouracil
  modified_base 959: mod_base = OTHER; note = N1-methylpseudouracil
  modified_base 976: mod_base = OTHER; note = N1-methylpseudouracil
  modified_base 983: mod_base = OTHER; note = N1-methylpseudouracil
  modified_base 992: mod_base = OTHER; note = N1-methylpseudouracil
  modified_base 995: mod_base = OTHER; note = N1-methylpseudouracil
  modified_base 1000: mod_base = OTHER; note = N1-methylpseudouracil
  modified_base 1010: mod_base = OTHER; note = N1-methylpseudouracil
  modified_base 1019: mod_base = OTHER; note = N1-methylpseudouracil
  modified_base 1022: mod_base = OTHER; note = N1-methylpseudouracil
  modified_base 1031: mod_base = OTHER; note = N1-methylpseudouracil
  modified_base 1034: mod_base = OTHER; note = N1-methylpseudouracil
  modified_base 1046: mod_base = OTHER; note = N1-methylpseudouracil
  modified_base 1049: mod_base = OTHER; note = N1-methylpseudouracil
  modified_base 1052: mod_base = OTHER; note = N1-methylpseudouracil
  modified_base 1055: mod_base = OTHER; note = N1-methylpseudouracil
  modified_base 1057: mod_base = OTHER; note = N1-methylpseudouracil
  modified_base 1058: mod_base = OTHER; note = N1-methylpseudouracil
  modified_base 1064: mod_base = OTHER; note = N1-methylpseudouracil
  modified_base 1079: mod_base = OTHER; note = N1-methylpseudouracil
  modified_base 1085: mod_base = OTHER; note = N1-methylpseudouracil
  modified_base 1087: mod_base = OTHER; note = N1-methylpseudouracil
  modified_base 1096: mod_base = OTHER; note = N1-methylpseudouracil
  modified_base 1106: mod_base = OTHER; note = N1-methylpseudouracil
  modified_base 1109: mod_base = OTHER; note = N1-methylpseudouracil
  modified_base 1110: mod_base = OTHER; note = N1-methylpseudouracil
  modified_base 1124: mod_base = OTHER; note = N1-methylpseudouracil
  modified_base 1128: mod_base = OTHER; note = N1-methylpseudouracil
  modified_base 1130: mod_base = OTHER; note = N1-methylpseudouracil
  modified_base 1133: mod_base = OTHER; note = N1-methylpseudouracil
  modified_base 1154: mod_base = OTHER; note = N1-methylpseudouracil
  modified_base 1157: mod_base = OTHER; note = N1-methylpseudouracil
  modified_base 1163: mod_base = OTHER; note = N1-methylpseudouracil
  modified_base 1166: mod_base = OTHER; note = N1-methylpseudouracil
  modified_base 1169: mod_base = OTHER; note = N1-methylpseudouracil
  modified_base 1171: mod_base = OTHER; note = N1-methylpseudouracil
  modified_base 1177: mod_base = OTHER; note = N1-methylpseudouracil
  modified_base 1187: mod_base = OTHER; note = N1-methylpseudouracil
  modified_base 1199: mod_base = OTHER; note = N1-methylpseudouracil
  modified_base 1205: mod_base = OTHER; note = N1-methylpseudouracil
  modified_base 1211: mod_base = OTHER; note = N1-methylpseudouracil
  modified_base 1214: mod_base = OTHER; note = N1-methylpseudouracil
  modified_base 1232: mod_base = OTHER; note = N1-methylpseudouracil
  modified_base 1238: mod_base = OTHER; note = N1-methylpseudouracil
  modified_base 1240: mod_base = OTHER; note = N1-methylpseudouracil
  modified_base 1243: mod_base = OTHER; note = N1-methylpseudouracil
  modified_base 1244: mod_base = OTHER; note = N1-methylpseudouracil
  modified_base 1253: mod_base = OTHER; note = N1-methylpseudouracil
  modified_base 1255: mod_base = OTHER; note = N1-methylpseudouracil
  modified_base 1271: mod_base = OTHER; note = N1-methylpseudouracil
  modified_base 1273: mod_base = OTHER; note = N1-methylpseudouracil
  modified_base 1274: mod_base = OTHER; note = N1-methylpseudouracil
  modified_base 1291: mod_base = OTHER; note = N1-methylpseudouracil
  modified_base 1301: mod_base = OTHER; note = N1-methylpseudouracil
  modified_base 1307: mod_base = OTHER; note = N1-methylpseudouracil
  modified_base 1324: mod_base = OTHER; note = N1-methylpseudouracil
  modified_base 1325: mod_base = OTHER; note = N1-methylpseudouracil
  modified_base 1331: mod_base = OTHER; note = N1-methylpseudouracil
  modified_base 1337: mod_base = OTHER; note = N1-methylpseudouracil
  modified_base 1343: mod_base = OTHER; note = N1-methylpseudouracil
  modified_base 1347: mod_base = OTHER; note = N1-methylpseudouracil
  modified_base 1351: mod_base = OTHER; note = N1-methylpseudouracil
  modified_base 1353: mod_base = OTHER; note = N1-methylpseudouracil
  modified_base 1373: mod_base = OTHER; note = N1-methylpseudouracil
  modified_base 1376: mod_base = OTHER; note = N1-methylpseudouracil
  modified_base 1379: mod_base = OTHER; note = N1-methylpseudouracil
  modified_base 1388: mod_base = OTHER; note = N1-methylpseudouracil
  modified_base 1394: mod_base = OTHER; note = N1-methylpseudouracil
  modified_base 1406: mod_base = OTHER; note = N1-methylpseudouracil
  modified_base 1412: mod_base = OTHER; note = N1-methylpseudouracil
  modified_base 1415: mod_base = OTHER; note = N1-methylpseudouracil
  modified_base 1418: mod_base = OTHER; note = N1-methylpseudouracil
  modified_base 1420: mod_base = OTHER; note = N1-methylpseudouracil
  modified_base 1422: mod_base = OTHER; note = N1-methylpseudouracil
  modified_base 1429: mod_base = OTHER; note = N1-methylpseudouracil
  modified_base 1435: mod_base = OTHER; note = N1-methylpseudouracil
  modified_base 1441: mod_base = OTHER; note = N1-methylpseudouracil
  modified_base 1454: mod_base = OTHER; note = N1-methylpseudouracil
  modified_base 1460: mod_base = OTHER; note = N1-methylpseudouracil
  modified_base 1465: mod_base = OTHER; note = N1-methylpseudouracil
  modified_base 1467: mod_base = OTHER; note = N1-methylpseudouracil
  modified_base 1474: mod_base = OTHER; note = N1-methylpseudouracil
  modified_base 1494: mod_base = OTHER; note = N1-methylpseudouracil
  modified_base 1495: mod_base = OTHER; note = N1-methylpseudouracil
  modified_base 1496: mod_base = OTHER; note = N1-methylpseudouracil
  modified_base 1501: mod_base = OTHER; note = N1-methylpseudouracil
  modified_base 1503: mod_base = OTHER; note = N1-methylpseudouracil
  modified_base 1508: mod_base = OTHER; note = N1-methylpseudouracil
  modified_base 1510: mod_base = OTHER; note = N1-methylpseudouracil
  modified_base 1512: mod_base = OTHER; note = N1-methylpseudouracil
  modified_base 1516: mod_base = OTHER; note = N1-methylpseudouracil
  modified_base 1527: mod_base = OTHER; note = N1-methylpseudouracil
  modified_base 1532: mod_base = OTHER; note = N1-methylpseudouracil
  modified_base 1543: mod_base = OTHER; note = N1-methylpseudouracil
  modified_base 1545: mod_base = OTHER; note = N1-methylpseudouracil
  modified_base 1549: mod_base = OTHER; note = N1-methylpseudouracil
  modified_base 1562: mod_base = OTHER; note = N1-methylpseudouracil
  modified_base 1565: mod_base = OTHER; note = N1-methylpseudouracil
  modified_base 1579: mod_base = OTHER; note = N1-methylpseudouracil
  modified_base 1606: mod_base = OTHER; note = N1-methylpseudouracil
  modified_base 1608: mod_base = OTHER; note = N1-methylpseudouracil
  modified_base 1609: mod_base = OTHER; note = N1-methylpseudouracil
  modified_base 1614: mod_base = OTHER; note = N1-methylpseudouracil
  modified_base 1624: mod_base = OTHER; note = N1-methylpseudouracil
  modified_base 1627: mod_base = OTHER; note = N1-methylpseudouracil
  modified_base 1630: mod_base = OTHER; note = N1-methylpseudouracil
  modified_base 1639: mod_base = OTHER; note = N1-methylpseudouracil
  modified_base 1643: mod_base = OTHER; note = N1-methylpseudouracil
  modified_base 1645: mod_base = OTHER; note = N1-methylpseudouracil
  modified_base 1647: mod_base = OTHER; note = N1-methylpseudouracil
  modified_base 1652: mod_base = OTHER; note = N1-methylpseudouracil
  modified_base 1660: mod_base = OTHER; note = N1-methylpseudouracil
  modified_base 1670: mod_base = OTHER; note = N1-methylpseudouracil
  modified_base 1672: mod_base = OTHER; note = N1-methylpseudouracil
  modified_base 1681: mod_base = OTHER; note = N1-methylpseudouracil
  modified_base 1684: mod_base = OTHER; note = N1-methylpseudouracil
  modified_base 1690: mod_base = OTHER; note = N1-methylpseudouracil
  modified_base 1699: mod_base = OTHER; note = N1-methylpseudouracil
  modified_base 1700: mod_base = OTHER; note = N1-methylpseudouracil
  modified_base 1702: mod_base = OTHER; note = N1-methylpseudouracil
  modified_base 1705: mod_base = OTHER; note = N1-methylpseudouracil
  modified_base 1709: mod_base = OTHER; note = N1-methylpseudouracil
  modified_base 1724: mod_base = OTHER; note = N1-methylpseudouracil
  modified_base 1727: mod_base = OTHER; note = N1-methylpseudouracil
  modified_base 1729: mod_base = OTHER; note = N1-methylpseudouracil
  modified_base 1731: mod_base = OTHER; note = N1-methylpseudouracil
  modified_base 1747: mod_base = OTHER; note = N1-methylpseudouracil
  modified_base 1753: mod_base = OTHER; note = N1-methylpseudouracil
  modified_base 1762: mod_base = OTHER; note = N1-methylpseudouracil
  modified_base 1766: mod_base = OTHER; note = N1-methylpseudouracil
  modified_base 1768: mod_base = OTHER; note = N1-methylpseudouracil
  modified_base 1776: mod_base = OTHER; note = N1-methylpseudouracil
  modified_base 1780: mod_base = OTHER; note = N1-methylpseudouracil
  modified_base 1792: mod_base = OTHER; note = N1-methylpseudouracil
  modified_base 1795: mod_base = OTHER; note = N1-methylpseudouracil
  modified_base 1801: mod_base = OTHER; note = N1-methylpseudouracil
  modified_base 1810: mod_base = OTHER; note = N1-methylpseudouracil
  modified_base 1819: mod_base = OTHER; note = N1-methylpseudouracil
  modified_base 1821: mod_base = OTHER; note = N1-methylpseudouracil
  modified_base 1822: mod_base = OTHER; note = N1-methylpseudouracil
  modified_base 1826: mod_base = OTHER; note = N1-methylpseudouracil
  modified_base 1828: mod_base = OTHER; note = N1-methylpseudouracil
  modified_base 1841: mod_base = OTHER; note = N1-methylpseudouracil
  modified_base 1844: mod_base = OTHER; note = N1-methylpseudouracil
  modified_base 1846: mod_base = OTHER; note = N1-methylpseudouracil
  modified_base 1848: mod_base = OTHER; note = N1-methylpseudouracil
  modified_base 1849: mod_base = OTHER; note = N1-methylpseudouracil
  modified_base 1863: mod_base = OTHER; note = N1-methylpseudouracil
  modified_base 1864: mod_base = OTHER; note = N1-methylpseudouracil
  modified_base 1868: mod_base = OTHER; note = N1-methylpseudouracil
  modified_base 1870: mod_base = OTHER; note = N1-methylpseudouracil
  modified_base 1879: mod_base = OTHER; note = N1-methylpseudouracil
  modified_base 1883: mod_base = OTHER; note = N1-methylpseudouracil
  modified_base 1885: mod_base = OTHER; note = N1-methylpseudouracil
  modified_base 1896: mod_base = OTHER; note = N1-methylpseudouracil
  modified_base 1903: mod_base = OTHER; note = N1-methylpseudouracil
  modified_base 1908: mod_base = OTHER; note = N1-methylpseudouracil
  modified_base 1911: mod_base = OTHER; note = N1-methylpseudouracil
  modified_base 1915: mod_base = OTHER; note = N1-methylpseudouracil
  modified_base 1924: mod_base = OTHER; note = N1-methylpseudouracil
  modified_base 1933: mod_base = OTHER; note = N1-methylpseudouracil
  modified_base 1935: mod_base = OTHER; note = N1-methylpseudouracil
  modified_base 1945: mod_base = OTHER; note = N1-methylpseudouracil
  modified_base 1960: mod_base = OTHER; note = N1-methylpseudouracil
  modified_base 1962: mod_base = OTHER; note = N1-methylpseudouracil
  modified_base 1963: mod_base = OTHER; note = N1-methylpseudouracil
  modified_base 1967: mod_base = OTHER; note = N1-methylpseudouracil
  modified_base 1972: mod_base = OTHER; note = N1-methylpseudouracil
  modified_base 1979: mod_base = OTHER; note = N1-methylpseudouracil
  modified_base 1981: mod_base = OTHER; note = N1-methylpseudouracil
  modified_base 1998: mod_base = OTHER; note = N1-methylpseudouracil
  modified_base 2008: mod_base = OTHER; note = N1-methylpseudouracil
  modified_base 2012: mod_base = OTHER; note = N1-methylpseudouracil
  modified_base 2020: mod_base = OTHER; note = N1-methylpseudouracil
  modified_base 2027: mod_base = OTHER; note = N1-methylpseudouracil
  modified_base 2042: mod_base = OTHER; note = N1-methylpseudouracil
  modified_base 2046: mod_base = OTHER; note = N1-methylpseudouracil
  modified_base 2059: mod_base = OTHER; note = N1-methylpseudouracil
  modified_base 2060: mod_base = OTHER; note = N1-methylpseudouracil
  modified_base 2062: mod_base = OTHER; note = N1-methylpseudouracil
  modified_base 2078: mod_base = OTHER; note = N1-methylpseudouracil
  modified_base 2080: mod_base = OTHER; note = N1-methylpseudouracil
  modified_base 2083: mod_base = OTHER; note = N1-methylpseudouracil
  modified_base 2086: mod_base = OTHER; note = N1-methylpseudouracil
  modified_base 2090: mod_base = OTHER; note = N1-methylpseudouracil
  modified_base 2107: mod_base = OTHER; note = N1-methylpseudouracil
  modified_base 2111: mod_base = OTHER; note = N1-methylpseudouracil
  modified_base 2114: mod_base = OTHER; note = N1-methylpseudouracil
  modified_base 2119: mod_base = OTHER; note = N1-methylpseudouracil
  modified_base 2120: mod_base = OTHER; note = N1-methylpseudouracil
  modified_base 2123: mod_base = OTHER; note = N1-methylpseudouracil
  modified_base 2126: mod_base = OTHER; note = N1-methylpseudouracil
  modified_base 2153: mod_base = OTHER; note = N1-methylpseudouracil
  modified_base 2156: mod_base = OTHER; note = N1-methylpseudouracil
  modified_base 2161: mod_base = OTHER; note = N1-methylpseudouracil
  modified_base 2165: mod_base = OTHER; note = N1-methylpseudouracil
  modified_base 2179: mod_base = OTHER; note = N1-methylpseudouracil
  modified_base 2193: mod_base = OTHER; note = N1-methylpseudouracil
  modified_base 2198: mod_base = OTHER; note = N1-methylpseudouracil
  modified_base 2204: mod_base = OTHER; note = N1-methylpseudouracil
  modified_base 2207: mod_base = OTHER; note = N1-methylpseudouracil
  modified_base 2210: mod_base = OTHER; note = N1-methylpseudouracil
  modified_base 2213: mod_base = OTHER; note = N1-methylpseudouracil
  modified_base 2219: mod_base = OTHER; note = N1-methylpseudouracil
  modified_base 2225: mod_base = OTHER; note = N1-methylpseudouracil
  modified_base 2231: mod_base = OTHER; note = N1-methylpseudouracil
  modified_base 2234: mod_base = OTHER; note = N1-methylpseudouracil
  modified_base 2237: mod_base = OTHER; note = N1-methylpseudouracil
  modified_base 2240: mod_base = OTHER; note = N1-methylpseudouracil
  modified_base 2246: mod_base = OTHER; note = N1-methylpseudouracil
  modified_base 2249: mod_base = OTHER; note = N1-methylpseudouracil
  modified_base 2252: mod_base = OTHER; note = N1-methylpseudouracil
  modified_base 2255: mod_base = OTHER; note = N1-methylpseudouracil
  modified_base 2257: mod_base = OTHER; note = N1-methylpseudouracil
  modified_base 2261: mod_base = OTHER; note = N1-methylpseudouracil
  modified_base 2263: mod_base = OTHER; note = N1-methylpseudouracil
  modified_base 2270: mod_base = OTHER; note = N1-methylpseudouracil
  modified_base 2273: mod_base = OTHER; note = N1-methylpseudouracil
  modified_base 2276: mod_base = OTHER; note = N1-methylpseudouracil
  modified_base 2278: mod_base = OTHER; note = N1-methylpseudouracil
  modified_base 2281: mod_base = OTHER; note = N1-methylpseudouracil
  modified_base 2282: mod_base = OTHER; note = N1-methylpseudouracil
  modified_base 2300: mod_base = OTHER; note = N1-methylpseudouracil
  modified_base 2308: mod_base = OTHER; note = N1-methylpseudouracil
  modified_base 2309: mod_base = OTHER; note = N1-methylpseudouracil
  modified_base 2323: mod_base = OTHER; note = N1-methylpseudouracil
  modified_base 2325: mod_base = OTHER; note = N1-methylpseudouracil
  modified_base 2335: mod_base = OTHER; note = N1-methylpseudouracil
  modified_base 2355: mod_base = OTHER; note = N1-methylpseudouracil
  modified_base 2357: mod_base = OTHER; note = N1-methylpseudouracil
  modified_base 2359: mod_base = OTHER; note = N1-methylpseudouracil
  modified_base 2368: mod_base = OTHER; note = N1-methylpseudouracil
  modified_base 2380: mod_base = OTHER; note = N1-methylpseudouracil
  modified_base 2381: mod_base = OTHER; note = N1-methylpseudouracil
  modified_base 2390: mod_base = OTHER; note = N1-methylpseudouracil
  modified_base 2395: mod_base = OTHER; note = N1-methylpseudouracil
  modified_base 2420: mod_base = OTHER; note = N1-methylpseudouracil
  modified_base 2426: mod_base = OTHER; note = N1-methylpseudouracil
  modified_base 2428: mod_base = OTHER; note = N1-methylpseudouracil
  modified_base 2437: mod_base = OTHER; note = N1-methylpseudouracil
  modified_base 2439: mod_base = OTHER; note = N1-methylpseudouracil
  modified_base 2450: mod_base = OTHER; note = N1-methylpseudouracil
  modified_base 2457: mod_base = OTHER; note = N1-methylpseudouracil
  modified_base 2462: mod_base = OTHER; note = N1-methylpseudouracil
  modified_base 2465: mod_base = OTHER; note = N1-methylpseudouracil
  modified_base 2471: mod_base = OTHER; note = N1-methylpseudouracil
  modified_base 2476: mod_base = OTHER; note = N1-methylpseudouracil
  modified_base 2482: mod_base = OTHER; note = N1-methylpseudouracil
  modified_base 2485: mod_base = OTHER; note = N1-methylpseudouracil
  modified_base 2488: mod_base = OTHER; note = N1-methylpseudouracil
  modified_base 2493: mod_base = OTHER; note = N1-methylpseudouracil
  modified_base 2500: mod_base = OTHER; note = N1-methylpseudouracil
  modified_base 2504: mod_base = OTHER; note = N1-methylpseudouracil
  modified_base 2509: mod_base = OTHER; note = N1-methylpseudouracil
  modified_base 2513: mod_base = OTHER; note = N1-methylpseudouracil
  modified_base 2514: mod_base = OTHER; note = N1-methylpseudouracil
  modified_base 2516: mod_base = OTHER; note = N1-methylpseudouracil
  modified_base 2517: mod_base = OTHER; note = N1-methylpseudouracil
  modified_base 2523: mod_base = OTHER; note = N1-methylpseudouracil
  modified_base 2524: mod_base = OTHER; note = N1-methylpseudouracil
  modified_base 2530: mod_base = OTHER; note = N1-methylpseudouracil
  modified_base 2543: mod_base = OTHER; note = N1-methylpseudouracil
  modified_base 2546: mod_base = OTHER; note = N1-methylpseudouracil
  modified_base 2551: mod_base = OTHER; note = N1-methylpseudouracil
  modified_base 2552: mod_base = OTHER; note = N1-methylpseudouracil
  modified_base 2555: mod_base = OTHER; note = N1-methylpseudouracil
  modified_base 2563: mod_base = OTHER; note = N1-methylpseudouracil
  modified_base 2579: mod_base = OTHER; note = N1-methylpseudouracil
  modified_base 2580: mod_base = OTHER; note = N1-methylpseudouracil
  modified_base 2582: mod_base = OTHER; note = N1-methylpseudouracil
  modified_base 2588: mod_base = OTHER; note = N1-methylpseudouracil
  modified_base 2593: mod_base = OTHER; note = N1-methylpseudouracil
  modified_base 2596: mod_base = OTHER; note = N1-methylpseudouracil
  modified_base 2598: mod_base = OTHER; note = N1-methylpseudouracil
  modified_base 2599: mod_base = OTHER; note = N1-methylpseudouracil
  modified_base 2600: mod_base = OTHER; note = N1-methylpseudouracil
  modified_base 2604: mod_base = OTHER; note = N1-methylpseudouracil
  modified_base 2609: mod_base = OTHER; note = N1-methylpseudouracil
  modified_base 2611: mod_base = OTHER; note = N1-methylpseudouracil
  modified_base 2615: mod_base = OTHER; note = N1-methylpseudouracil
ggaaatcgcaaaatttgctcttcgcgttagatttcttttagttttctcgcaactagcaagctttttgttctcgccatggggatcgagctgctgtgcctgttcttcctgttcctgggacggaacgaccacgtgcagggtggctgcgcccttggtggggcagagacctgcgaggactgcctgctcatcggcccacagtgcgcctggtgcgctcaggagaacttcacccaccccagcggagtgggcgagaggtgcgacaccccggccaacctgctggccaaggggtgccagctgaacttcatcgagaaccccgtctctcaggtggagatcctgaagaacaagcccctcagcgttgggcggcagaagaacagctctgacatcgtgcagatcgcgccccagagcctgatcctgaaactacggcctggcggtgcgcaaaccctgcaggtccacgtgcggcagaccgaggactaccctgtggacctgtactacctgatggacctctcctacagcatggacgacgatctgaacaccatcaaggagctgggcagccgcctgagcaaggagatgtccaagctgacctccaacttccgcctggggttcggatccttcgtggagaagcccgtgagccccttcgtgaagaccacccctgaggagatcgccaacccctgcagcagcatcccttacttctgcctgcccaccttcggcttcaagcacatcctgccactgaccaacgacgccgagcggttcaacgagatcgtgaagaaccagaagatcagcgccaacatcgacgccccggagggtgggttcgacgctatcatgcaggccgccgtgtgcaaggagaagatcggctggcgcaacgacagcctgcacctgctggtgttcgtgtccgacgccgactcccacttcggcatggacagcaagctggccggtatcgtgatccctaacgacggcctgtgccacctggacagcaagaacgagtacagcatgagcaccgtgctggagtaccccaccatcggccagctgatcgacaagctggtgcagaacaacgtgctgctgatcttcgccgtgacccaggagcaggtgcacctctacgagaactacgccaagctgattccaggcgccaccgtcggtctgctgcagaaggacagcggcaacatcctgcagctgatcatctccgcctacgaggagctgaggagcgaggtggagctggaggtgctcggggacaccgagggcctgaacctgtccttcaccgccatctgcaacaacgggaccctcttccagcaccagaagaagtgcagccacatgaaggtgggcgacaccgccagcttcagcgtcaccgtgaacatacctcactgtgagcggcggagcaggcacatcatcatcaagcccgtgggcctgggagacgccctggagctgctggtgtctcccgagtgcaactgcgactgccagaaggaggtggaggtgaactctagcaagtgccaccacggcaacgggagtttccagtgtggcgtgtgtgcctgccaccccggtcacatgggaccccggtgtgagtgcggggaggacatgctgagcaccgacagctgcaaggaggccccagaccacccgagctgttccggtcggggcgactgctactgcggccagtgcatctgtcacctgagcccctacggcaacatctacgggccctactgccagtgcgacaacttctcctgcgtgcgccacaaaggcctgctgtgtggcggcaacggcgactgcgactgcggggagtgcgtgtgccgcagtgggtggaccggcgagtactgcaactgcaccacctccaccgactcttgcgtgtccgaggacggggtgctgtgttccgggcgcggagattgcgtgtgcgggaagtgcgtgtgcaccaaccctggcgcatcgggtcctacctgcgagaggtgccccacctgtggcgacccctgcaacagcaagcgctcttgcatcgagtgccacctctcagcagcagggcaggctcgggaggagtgcgtggacaagtgcaagctcgccggcgccaccatcagtgaggaggaggacttctccaaggacggcagcgtgtcctgctccctccagggcgagaacgagtgcctcatcaccttcctgatcaccaccgacaacgagggcaagaccatcatccactccatcaacgagaaggactgccccaagccgcctaacatccccatgatcatgctgggcgtgagcctggccatcctgctgatcggcgtggtgctgctgtgcatctggaagctgctggtctccttccacgaccgcaaggaggtggccaagttcgaggccgagcgctctaaggccaagtggcagaccggcaccaaccctctgtaccggggctccaccagcaccttcaagaacgtgacctacaagcaccgcgagaagcagaaggtggacctgtccaccgactgtggcaagcccatccccaatcccctgctggggctggactccacctgataataggctggagcctcggtggcctagcttcttgccccttgggcctccccccagcccctcctccccttcctgcacccgtaccccccaaacaccattgtcacactccagtggtctttgaataaagtctgagtgggcggc

SEQ ID NO: 172 - RNA, 2622 nt, unidentified
  source 1..2622: mol_type = unassigned RNA
  modified_base 6: mod_base = OTHER; note = N1-methylpseudouracil
  modified_base 14: mod_base = OTHER; note = N1-methylpseudouracil
  modified_base 15: mod_base = OTHER; note = N1-methylpseudouracil
  modified_base 16: mod_base = OTHER; note = N1-methylpseudouracil
  modified_base 19: mod_base = OTHER; note = N1-methylpseudouracil
  modified_base 21: mod_base = OTHER; note = N1-methylpseudouracil
  modified_base 22: mod_base = OTHER; note = N1-methylpseudouracil
  modified_base 27: mod_base = OTHER; note = N1-methylpseudouracil
  modified_base 28: mod_base = OTHER; note = N1-methylpseudouracil
  modified_base 32: mod_base = OTHER; note = N1-methylpseudouracil
  modified_base 33: mod_base = OTHER; note = N1-methylpseudouracil
  modified_base 34: mod_base = OTHER; note = N1-methylpseudouracil
  modified_base 36: mod_base = OTHER; note = N1-methylpseudouracil
  modified_base 37: mod_base = OTHER; note = N1-methylpseudouracil
  modified_base 38: mod_base = OTHER; note = N1-methylpseudouracil
  modified_base 39: mod_base = OTHER; note = N1-methylpseudouracil
  modified_base 42: mod_base = OTHER; note = N1-methylpseudouracil
  modified_base 43: mod_base = OTHER; note = N1-methylpseudouracil
  modified_base 44: mod_base = OTHER; note = N1-methylpseudouracil
  modified_base 45: mod_base = OTHER; note = N1-methylpseudouracil
  modified_base 47: mod_base = OTHER; note = N1-methylpseudouracil
  modified_base 54: mod_base = OTHER; note = N1-methylpseudouracil
  modified_base 62: mod_base = OTHER; note = N1-methylpseudouracil
  modified_base 63: mod_base = OTHER; note = N1-methylpseudouracil
  modified_base 64: mod_base = OTHER; note = N1-methylpseudouracil
  modified_base 65: mod_base = OTHER; note = N1-methylpseudouracil
  modified_base 66: mod_base = OTHER; note = N1-methylpseudouracil
  modified_base 68: mod_base = OTHER; note = N1-methylpseudouracil
  modified_base 69: mod_base = OTHER; note = N1-methylpseudouracil
  modified_base 71: mod_base = OTHER; note = N1-methylpseudouracil
  modified_base 77: mod_base = OTHER; note = N1-methylpseudouracil
  modified_base 83: mod_base = OTHER; note = N1-methylpseudouracil
  modified_base 89: mod_base = OTHER; note = N1-methylpseudouracil
  modified_base 92: mod_base = OTHER; note = N1-methylpseudouracil
  modified_base 94: mod_base = OTHER; note = N1-methylpseudouracil
  modified_base 98: mod_base = OTHER; note = N1-methylpseudouracil
  modified_base 100: mod_base = OTHER; note = N1-methylpseudouracil
  modified_base 101: mod_base = OTHER; note = N1-methylpseudouracil
  modified_base 103: mod_base = OTHER; note = N1-methylpseudouracil
  modified_base 104: mod_base = OTHER; note = N1-methylpseudouracil
  modified_base 107: mod_base = OTHER; note = N1-methylpseudouracil
  modified_base 109: mod_base = OTHER; note = N1-methylpseudouracil
  modified_base 110: mod_base = OTHER; note = N1-methylpseudouracil
  modified_base 113: mod_base = OTHER; note = N1-methylpseudouracil
  modified_base 131: mod_base = OTHER; note = N1-methylpseudouracil
  modified_base 138: mod_base = OTHER; note = N1-methylpseudouracil
  modified_base 142: mod_base = OTHER; note = N1-methylpseudouracil
  modified_base 149: mod_base = OTHER; note = N1-methylpseudouracil
  modified_base 150: mod_base = OTHER; note = N1-methylpseudouracil
  modified_base 153: mod_base = OTHER; note = N1-methylpseudouracil
  modified_base 166: mod_base = OTHER; note = N1-methylpseudouracil
  modified_base 175: mod_base = OTHER; note = N1-methylpseudouracil
  modified_base 179: mod_base = OTHER; note = N1-methylpseudouracil
  modified_base 182: mod_base = OTHER; note = N1-methylpseudouracil
  modified_base 185: mod_base = OTHER; note = N1-methylpseudouracil
  modified_base 196: mod_base = OTHER; note = N1-methylpseudouracil
  modified_base 202: mod_base = OTHER; note = N1-methylpseudouracil
  modified_base 205: mod_base = OTHER; note = N1-methylpseudouracil
  modified_base 210: mod_base = OTHER; note = N1-methylpseudouracil
  modified_base 220: mod_base = OTHER; note = N1-methylpseudouracil
  modified_base 221: mod_base = OTHER; note = N1-methylpseudouracil
  modified_base 239: mod_base = OTHER; note = N1-methylpseudouracil
  modified_base 250: mod_base = OTHER; note = N1-methylpseudouracil
  modified_base 269: mod_base = OTHER; note = N1-methylpseudouracil
  modified_base 272: mod_base = OTHER; note = N1-methylpseudouracil
  modified_base 283: mod_base = OTHER; note = N1-methylpseudouracil
  modified_base 290: mod_base = OTHER; note = N1-methylpseudouracil
  modified_base 295: mod_base = OTHER; note = N1-methylpseudouracil
  modified_base 296: mod_base = OTHER; note = N1-methylpseudouracil
  modified_base 299: mod_base = OTHER; note = N1-methylpseudouracil
  modified_base 311: mod_base = OTHER; note = N1-methylpseudouracil
  modified_base 313: mod_base = OTHER; note = N1-methylpseudouracil
  modified_base 315: mod_base = OTHER; note = N1-methylpseudouracil
  modified_base 320: mod_base = OTHER; note = N1-methylpseudouracil
  modified_base 326: mod_base = OTHER; note = N1-methylpseudouracil
  modified_base 329: mod_base = OTHER; note = N1-methylpseudouracil
  modified_base 344: mod_base = OTHER; note = N1-methylpseudouracil
  modified_base 350: mod_base = OTHER; note = N1-methylpseudouracil
  modified_base 351: mod_base = OTHER; note = N1-methylpseudouracil
  modified_base 370: mod_base = OTHER; note = N1-methylpseudouracil
  modified_base 372: mod_base = OTHER; note = N1-methylpseudouracil
  modified_base 377: mod_base = OTHER; note = N1-methylpseudouracil
  modified_base 380: mod_base = OTHER; note = N1-methylpseudouracil
  modified_base 386: mod_base = OTHER; note = N1-methylpseudouracil
  modified_base 401: mod_base = OTHER; note = N1-methylpseudouracil
  modified_base 404: mod_base = OTHER; note = N1-methylpseudouracil
  modified_base 407: mod_base = OTHER; note = N1-methylpseudouracil
  modified_base 413: mod_base = OTHER; note = N1-methylpseudouracil
  modified_base 420: mod_base = OTHER; note = N1-methylpseudouracil
  modified_base 426: mod_base = OTHER; note = N1-methylpseudouracil
  modified_base 437: mod_base = OTHER; note = N1-methylpseudouracil
  modified_base 443: mod_base = OTHER; note = N1-methylpseudouracil
  modified_base 449: mod_base = OTHER; note = N1-methylpseudouracil
  modified_base 466: mod_base = OTHER; note = N1-methylpseudouracil
  modified_base 471: mod_base = OTHER; note = N1-methylpseudouracil
  modified_base 473: mod_base = OTHER; note = N1-methylpseudouracil
  modified_base 479: mod_base = OTHER; note = N1-methylpseudouracil
  modified_base 481: mod_base = OTHER; note = N1-methylpseudouracil
  modified_base 484: mod_base = OTHER; note = N1-methylpseudouracil
  modified_base 488: mod_base = OTHER; note = N1-methylpseudouracil
  modified_base 491: mod_base = OTHER; note = N1-methylpseudouracil
  modified_base 497: mod_base = OTHER; note = N1-methylpseudouracil
  modified_base 499: mod_base = OTHER; note = N1-methylpseudouracil
  modified_base 502: mod_base = OTHER; note = N1-methylpseudouracil
  modified_base 509: mod_base = OTHER; note = N1-methylpseudouracil
  modified_base 519: mod_base = OTHER; note = N1-methylpseudouracil
  modified_base 521: mod_base = OTHER; note = N1-methylpseudouracil
  modified_base 530: mod_base = OTHER; note = N1-methylpseudouracil
  modified_base 539: mod_base = OTHER; note = N1-methylpseudouracil
  modified_base 551: mod_base = OTHER; note = N1-methylpseudouracil
  modified_base 563: mod_base = OTHER; note = N1-methylpseudouracil
  modified_base 565: mod_base = OTHER; note = N1-methylpseudouracil
  modified_base 572: mod_base = OTHER; note = N1-methylpseudouracil
  modified_base 577: mod_base = OTHER; note = N1-methylpseudouracil
  modified_base 583: mod_base = OTHER; note = N1-methylpseudouracil
  modified_base 584: mod_base = OTHER; note = N1-methylpseudouracil
  modified_base 590: mod_base = OTHER; note = N1-methylpseudouracil
  modified_base 595: mod_base = OTHER; note = N1-methylpseudouracil
  modified_base 596: mod_base = OTHER; note = N1-methylpseudouracil
  modified_base 601: mod_base = OTHER; note = N1-methylpseudouracil
  modified_base 604: mod_base = OTHER; note = N1-methylpseudouracil
  modified_base 605: mod_base = OTHER; note = N1-methylpseudouracil
  modified_base 608: mod_base = OTHER; note = N1-methylpseudouracil
  modified_base 620: mod_base = OTHER; note = N1-methylpseudouracil
  modified_base 628: mod_base = OTHER; note = N1-methylpseudouracil
  modified_base 629: mod_base = OTHER; note = N1-methylpseudouracil
  modified_base 632: mod_base = OTHER; note = N1-methylpseudouracil
  modified_base 645: mod_base = OTHER; note = N1-methylpseudouracil
  modified_base 653: mod_base = OTHER; note = N1-methylpseudouracil
  modified_base 664: mod_base = OTHER; note = N1-methylpseudouracil
  modified_base 674: mod_base = OTHER; note = N1-methylpseudouracil
  modified_base 678: mod_base = OTHER; note = N1-methylpseudouracil
  modified_base 679: mod_base = OTHER; note = N1-methylpseudouracil
  modified_base 682: mod_base = OTHER; note = N1-methylpseudouracil
  modified_base 683: mod_base = OTHER; note = N1-methylpseudouracil
  modified_base 685: mod_base = OTHER; note = N1-methylpseudouracil
  modified_base 689: mod_base = OTHER; note = N1-methylpseudouracil
  modified_base 697: mod_base = OTHER; note = N1-methylpseudouracil
  modified_base 698: mod_base = OTHER; note = N1-methylpseudouracil
  modified_base 703: mod_base = OTHER; note = N1-methylpseudouracil
  modified_base 704: mod_base = OTHER; note = N1-methylpseudouracil
  modified_base 713: mod_base = OTHER; note = N1-methylpseudouracil
  modified_base 716: mod_base = OTHER; note = N1-methylpseudouracil
  modified_base 722: mod_base = OTHER; note = N1-methylpseudouracil
  modified_base 742: mod_base = OTHER; note = N1-methylpseudouracil
  modified_base 743: mod_base = OTHER; note = N1-methylpseudouracil
  modified_base 752: mod_base = OTHER; note = N1-methylpseudouracil
  modified_base 755: mod_base = OTHER; note = N1-methylpseudouracil
  modified_base 770: mod_base = OTHER; note = N1-methylpseudouracil
  modified_base 782: mod_base = OTHER; note = N1-methylpseudouracil
  modified_base 798: mod_base = OTHER; note = N1-methylpseudouracil
  modified_base 802: mod_base = OTHER; note = N1-methylpseudouracil
  modified_base 803: mod_base = OTHER; note = N1-methylpseudouracil
  modified_base 810: mod_base = OTHER; note = N1-methylpseudouracil
  modified_base 812: mod_base = OTHER; note = N1-methylpseudouracil
  modified_base 815: mod_base = OTHER; note = N1-methylpseudouracil
  modified_base 827: mod_base = OTHER; note = N1-methylpseudouracil
  modified_base 829: mod_base = OTHER; note = N1-methylpseudouracil
  modified_base 842: mod_base = OTHER; note = N1-methylpseudouracil
  modified_base 847: mod_base = OTHER; note = N1-methylpseudouracil
  modified_base 863: mod_base = OTHER; note = N1-methylpseudouracil
  modified_base 869: mod_base = OTHER; note = N1-methylpseudouracil
  modified_base 872: mod_base = OTHER; note = N1-methylpseudouracil
  modified_base 875: mod_base = OTHER; note = N1-methylpseudouracil
  modified_base 877: mod_base = OTHER; note = N1-methylpseudouracil
  modified_base 878: mod_base = OTHER; note = N1-methylpseudouracil
  modified_base 881: mod_base = OTHER; note = N1-methylpseudouracil
  modified_base 883: mod_base = OTHER; note = N1-methylpseudouracil
  modified_base 895: mod_base = OTHER; note = N1-methylpseudouracil
  modified_base 901: mod_base = OTHER; note = N1-methylpseudouracil
  modified_base 902: mod_base = OTHER; note = N1-methylpseudouracil
  modified_base 908: mod_base = OTHER; note = N1-methylpseudouracil
  modified_base 920: mod_base = OTHER; note = N1-methylpseudouracil
  modified_base 927: mod_base = OTHER; note = N1-methylpseudouracil
  modified_base 929: mod_base = OTHER; note = N1-methylpseudouracil
  modified_base 932: mod_base = OTHER; note = N1-methylpseudouracil
  modified_base 935: mod_base = OTHER; note = N1-methylpseudouracil
  modified_base 939: mod_base = OTHER; note = N1-methylpseudouracil
  modified_base 950: mod_base = OTHER; note = N1-methylpseudouracil
  modified_base 952: mod_base = OTHER; note = N1-methylpseudouracil
  modified_base 959: mod_base = OTHER; note = N1-methylpseudouracil
  modified_base 976: mod_base = OTHER; note = N1-methylpseudouracil
  modified_base 983: mod_base = OTHER; note = N1-methylpseudouracil
  modified_base 992: mod_base = OTHER; note = N1-methylpseudouracil
  modified_base 995: mod_base = OTHER; note = N1-methylpseudouracil
  modified_base 1000: mod_base = OTHER; note = N1-methylpseudouracil
  modified_base 1010: mod_base = OTHER; note = N1-methylpseudouracil
  modified_base 1019: mod_base = OTHER; note = N1-methylpseudouracil
  modified_base 1022: mod_base = OTHER; note = N1-methylpseudouracil
  modified_base 1031: mod_base = OTHER; note = N1-methylpseudouracil
  modified_base 1034: mod_base = OTHER; note = N1-methylpseudouracil
  modified_base 1046: mod_base = OTHER; note = N1-methylpseudouracil
  modified_base 1049: mod_base = OTHER; note = N1-methylpseudouracil
  modified_base 1052: mod_base = OTHER; note = N1-methylpseudouracil
  modified_base 1055: mod_base = OTHER; note = N1-methylpseudouracil
  modified_base 1057: mod_base = OTHER; note = N1-methylpseudouracil
  modified_base 1058: mod_base = OTHER; note = N1-methylpseudouracil
  modified_base 1064: mod_base = OTHER; note = N1-methylpseudouracil
  modified_base 1079: mod_base = OTHER; note = N1-methylpseudouracil
  modified_base 1085: mod_base = OTHER; note = N1-methylpseudouracil
  modified_base 1087: mod_base = OTHER; note = N1-methylpseudouracil
  modified_base 1096: mod_base = OTHER; note = N1-methylpseudouracil
  modified_base 1106: mod_base = OTHER; note = N1-methylpseudouracil
  modified_base 1109: mod_base = OTHER; note = N1-methylpseudouracil
  modified_base 1110: mod_base = OTHER; note = N1-methylpseudouracil
  modified_base 1124: mod_base = OTHER; note = N1-methylpseudouracil
  modified_base 1128: mod_base = OTHER; note = N1-methylpseudouracil
  modified_base 1130: mod_base = OTHER; note = N1-methylpseudouracil
  modified_base 1133: mod_base = OTHER; note = N1-methylpseudouracil
  modified_base 1154: mod_base = OTHER; note = N1-methylpseudouracil
  modified_base 1157: mod_base = OTHER; note = N1-methylpseudouracil
  modified_base 1163: mod_base = OTHER; note = N1-methylpseudouracil
  modified_base 1166: mod_base = OTHER; note = N1-methylpseudouracil
  modified_base 1169: mod_base = OTHER; note = N1-methylpseudouracil
  modified_base 1171: mod_base = OTHER; note = N1-methylpseudouracil
  modified_base 1177: mod_base = OTHER; note = N1-methylpseudouracil
  modified_base 1187: mod_base = OTHER; note = N1-methylpseudouracil
  modified_base 1199: mod_base = OTHER; note = N1-methylpseudouracil
  modified_base 1205: mod_base = OTHER; note = N1-methylpseudouracil
  modified_base 1211: mod_base = OTHER; note = N1-methylpseudouracil
  modified_base 1214: mod_base = OTHER; note = N1-methylpseudouracil
  modified_base 1232: mod_base = OTHER; note = N1-methylpseudouracil
  modified_base 1238: mod_base = OTHER; note = N1-methylpseudouracil
  modified_base 1240: mod_base = OTHER; note = N1-methylpseudouracil
  modified_base 1243: mod_base = OTHER; note = N1-methylpseudouracil
  modified_base 1244: mod_base = OTHER; note = N1-methylpseudouracil
  modified_base 1253: mod_base = OTHER; note = N1-methylpseudouracil
  modified_base 1255: mod_base = OTHER; note = N1-methylpseudouracil
  modified_base 1271: mod_base = OTHER; note = N1-methylpseudouracil
  modified_base 1273: mod_base = OTHER; note = N1-methylpseudouracil
  modified_base 1274: mod_base = OTHER; note = N1-methylpseudouracil
  modified_base 1291: mod_base = OTHER; note = N1-methylpseudouracil
  modified_base 1301: mod_base = OTHER; note = N1-methylpseudouracil
  modified_base 1307: mod_base = OTHER; note = N1-methylpseudouracil
  modified_base 1324: mod_base = OTHER; note = N1-methylpseudouracil
  modified_base 1325: mod_base = OTHER; note = N1-methylpseudouracil
  modified_base 1331: mod_base = OTHER; note = N1-methylpseudouracil
  modified_base 1337: mod_base = OTHER; note = N1-methylpseudouracil
  modified_base 1343: mod_base = OTHER; note = N1-methylpseudouracil
  modified_base 1347: mod_base = OTHER; note = N1-methylpseudouracil
  modified_base 1351: mod_base = OTHER; note = N1-methylpseudouracil
  modified_base 1353: mod_base = OTHER; note = N1-methylpseudouracil
  modified_base 1373: mod_base = OTHER; note = N1-methylpseudouracil
  modified_base 1376: mod_base = OTHER; note = N1-methylpseudouracil
  modified_base 1379: mod_base = OTHER; note = N1-methylpseudouracil
  modified_base 1388: mod_base = OTHER; note = N1-methylpseudouracil
  modified_base 1394: mod_base = OTHER; note = N1-methylpseudouracil
  modified_base 1406: mod_base = OTHER; note = N1-methylpseudouracil
  modified_base 1412: mod_base = OTHER; note = N1-methylpseudouracil
  modified_base 1415: mod_base = OTHER; note = N1-methylpseudouracil
  modified_base 1418: mod_base = OTHER; note = N1-methylpseudouracil
  modified_base 1420: mod_base = OTHER; note = N1-methylpseudouracil
  modified_base 1422: mod_base = OTHER; note = N1-methylpseudouracil
  modified_base 1429: mod_base = OTHER; note = N1-methylpseudouracil
  modified_base 1435: mod_base = OTHER; note = N1-methylpseudouracil
  modified_base 1441: mod_base = OTHER; note = N1-methylpseudouracil
  modified_base 1454: mod_base = OTHER; note = N1-methylpseudouracil
  modified_base 1460: mod_base = OTHER; note = N1-methylpseudouracil
  modified_base 1465: mod_base = OTHER; note = N1-methylpseudouracil
  modified_base 1467: mod_base = OTHER; note = N1-methylpseudouracil
  modified_base 1474: mod_base = OTHER; note = N1-methylpseudouracil
  modified_base 1494: mod_base = OTHER; note = N1-methylpseudouracil
  modified_base 1495: mod_base = OTHER; note = N1-methylpseudouracil
  modified_base 1496: mod_base = OTHER; note = N1-methylpseudouracil
  modified_base 1501: mod_base = OTHER; note = N1-methylpseudouracil
  modified_base 1503: mod_base = OTHER; note = N1-methylpseudouracil
  modified_base 1508: mod_base = OTHER; note = N1-methylpseudouracil
  modified_base 1510: mod_base = OTHER; note = N1-methylpseudouracil
  modified_base 1512: mod_base = OTHER; note = N1-methylpseudouracil
  modified_base 1516: mod_base = OTHER; note = N1-methylpseudouracil
  modified_base 1527: mod_base = OTHER; note = N1-methylpseudouracil
  modified_base 1532: mod_base = OTHER; note = N1-methylpseudouracil
  modified_base 1543: mod_base = OTHER; note = N1-methylpseudouracil
  modified_base 1545: mod_base = OTHER; note = N1-methylpseudouracil
  modified_base 1549: mod_base = OTHER; note = N1-methylpseudouracil
  modified_base 1562: mod_base = OTHER; note = N1-methylpseudouracil
  modified_base 1565: mod_base = OTHER; note = N1-methylpseudouracil
  modified_base 1579: mod_base = OTHER; note = N1-methylpseudouracil
  modified_base 1606: mod_base = OTHER; note = N1-methylpseudouracil
  modified_base 1608: mod_base = OTHER; note = N1-methylpseudouracil
  modified_base 1609: mod_base = OTHER; note = N1-methylpseudouracil
  modified_base 1614: mod_base = OTHER; note = N1-methylpseudouracil
  modified_base 1624: mod_base = OTHER; note = N1-methylpseudouracil
  modified_base 1627: mod_base = OTHER; note = N1-methylpseudouracil
  modified_base 1630: mod_base = OTHER; note = N1-methylpseudouracil
  modified_base 1639: mod_base = OTHER; note = N1-methylpseudouracil
  modified_base 1643: mod_base = OTHER; note = N1-methylpseudouracil
  modified_base 1645: mod_base = OTHER; note = N1-methylpseudouracil
  modified_base 1647: mod_base = OTHER; note = N1-methylpseudouracil
  modified_base 1652: mod_base = OTHER; note = N1-methylpseudouracil
  modified_base 1660: mod_base = OTHER; note = N1-methylpseudouracil
  modified_base 1670: mod_base = OTHER; note = N1-methylpseudouracil
  modified_base 1672: mod_base = OTHER; note = N1-methylpseudouracil
  modified_base 1681: mod_base = OTHER; note = N1-methylpseudouracil
  modified_base 1684: mod_base = OTHER; note = N1-methylpseudouracil
  modified_base 1690: mod_base = OTHER; note = N1-methylpseudouracil
  modified_base 1699: mod_base = OTHER; note = N1-methylpseudouracil
  modified_base 1700: mod_base = OTHER; note = N1-methylpseudouracil
  modified_base 1702: mod_base = OTHER; note = N1-methylpseudouracil
  modified_base 1705: mod_base = OTHER; note = N1-methylpseudouracil
  modified_base 1709: mod_base = OTHER; note = N1-methylpseudouracil
  modified_base 1724: mod_base = OTHER; note = N1-methylpseudouracil
  modified_base 1727: mod_base = OTHER; note = N1-methylpseudouracil
  modified_base 1729: mod_base = OTHER; note = N1-methylpseudouracil
  modified_base 1731: mod_base = OTHER; note = N1-methylpseudouracil
  modified_base 1747: mod_base = OTHER; note = N1-methylpseudouracil
  modified_base 1753: mod_base = OTHER; note = N1-methylpseudouracil
  modified_base 1762: mod_base = OTHER; note = N1-methylpseudouracil
  modified_base 1766: mod_base = OTHER; note = N1-methylpseudouracil
  modified_base 1768: mod_base = OTHER; note = N1-methylpseudouracil
  modified_base 1776: mod_base = OTHER; note = N1-methylpseudouracil
  modified_base 1780: mod_base = OTHER; note = N1-methylpseudouracil
  modified_base 1792: mod_base = OTHER; note = N1-methylpseudouracil
  modified_base 1795: mod_base = OTHER; note = N1-methylpseudouracil
  modified_base 1801: mod_base = OTHER; note = N1-methylpseudouracil
  modified_base 1810: mod_base = OTHER; note = N1-methylpseudouracil
  modified_base 1819: mod_base = OTHER; note = N1-methylpseudouracil
  modified_base 1821: mod_base = OTHER; note = N1-methylpseudouracil
  modified_base 1822: mod_base = OTHER; note = N1-methylpseudouracil
  modified_base 1826: mod_base = OTHER; note = N1-methylpseudouracil
  modified_base 1828: mod_base = OTHER; note = N1-methylpseudouracil
  modified_base 1841: mod_base = OTHER; note = N1-methylpseudouracil
  modified_base 1844: mod_base = OTHER; note = N1-methylpseudouracil
  modified_base 1846: mod_base = OTHER; note = N1-methylpseudouracil
  modified_base 1848: mod_base = OTHER; note = N1-methylpseudouracil
  modified_base 1849: mod_base = OTHER; note = N1-methylpseudouracil
  modified_base 1863: mod_base = OTHER; note = N1-methylpseudouracil
  modified_base 1864: mod_base = OTHER; note = N1-methylpseudouracil
  modified_base 1868: mod_base = OTHER; note = N1-methylpseudouracil
  modified_base 1870: mod_base = OTHER; note = N1-methylpseudouracil
  modified_base 1879: mod_base = OTHER; note = N1-methylpseudouracil
  modified_base 1883: mod_base = OTHER; note = N1-methylpseudouracil
  modified_base 1885: mod_base = OTHER; note = N1-methylpseudouracil
  modified_base 1896: mod_base = OTHER; note = N1-methylpseudouracil
  modified_base 1903: mod_base = OTHER; note = N1-methylpseudouracil
  modified_base 1908: mod_base = OTHER; note = N1-methylpseudouracil
  modified_base 1911: mod_base = OTHER; note = N1-methylpseudouracil
  modified_base 1915: mod_base = OTHER; note = N1-methylpseudouracil
  modified_base 1924: mod_base = OTHER; note = N1-methylpseudouracil
  modified_base 1933: mod_base = OTHER; note = N1-methylpseudouracil
  modified_base 1935: mod_base = OTHER; note = N1-methylpseudouracil
  modified_base 1945: mod_base = OTHER; note = N1-methylpseudouracil
  modified_base 1960: mod_base = OTHER; note = N1-methylpseudouracil
  modified_base 1962: mod_base = OTHER; note = N1-methylpseudouracil
  modified_base 1963: mod_base = OTHER; note = N1-methylpseudouracil
  modified_base 1967: mod_base = OTHER; note = N1-methylpseudouracil
  modified_base 1972: mod_base = OTHER; note = N1-methylpseudouracil
  modified_base 1979: mod_base = OTHER; note = N1-methylpseudouracil
  modified_base 1981: mod_base = OTHER; note = N1-methylpseudouracil
  modified_base 1998: mod_base = OTHER; note = N1-methylpseudouracil
  modified_base 2008: mod_base = OTHER; note = N1-methylpseudouracil
  modified_base 2012: mod_base = OTHER; note = N1-methylpseudouracil
  modified_base 2020: mod_base = OTHER; note = N1-methylpseudouracil
  modified_base 2027: mod_base = OTHER; note = N1-methylpseudouracil
  modified_base 2042: mod_base = OTHER; note = N1-methylpseudouracil
  modified_base 2046: mod_base = OTHER; note = N1-methylpseudouracil
  modified_base 2059: mod_base = OTHER; note = N1-methylpseudouracil
  modified_base 2060: mod_base = OTHER; note = N1-methylpseudouracil
  modified_base 2062: mod_base = OTHER; note = N1-methylpseudouracil
  modified_base 2078: mod_base = OTHER; note = N1-methylpseudouracil
  modified_base 2080: mod_base = OTHER; note = N1-methylpseudouracil
  modified_base 2083: mod_base = OTHER; note = N1-methylpseudouracil
  modified_base 2086: mod_base = OTHER; note = N1-methylpseudouracil
  modified_base 2090: mod_base = OTHER; note = N1-methylpseudouracil
  modified_base 2107: mod_base = OTHER; note = N1-methylpseudouracil
  modified_base 2111: mod_base = OTHER; note = N1-methylpseudouracil
  modified_base 2114: mod_base = OTHER; note = N1-methylpseudouracil
  modified_base 2119: mod_base = OTHER; note = N1-methylpseudouracil
  modified_base 2120: mod_base = OTHER; note = N1-methylpseudouracil
  modified_base 2123: mod_base = OTHER; note = N1-methylpseudouracil
  modified_base 2126: mod_base = OTHER; note = N1-methylpseudouracil
  modified_base 2153: mod_base = OTHER; note = N1-methylpseudouracil
  modified_base 2156: mod_base = OTHER; note = N1-methylpseudouracil
  modified_base 2161: mod_base = OTHER; note = N1-methylpseudouracil
  modified_base 2165: mod_base = OTHER; note = N1-methylpseudouracil
  modified_base 2179: mod_base = OTHER; note = N1-methylpseudouracil
  modified_base 2193: mod_base = OTHER; note = N1-methylpseudouracil
  modified_base 2198: mod_base = OTHER; note = N1-methylpseudouracil
  modified_base 2204: mod_base = OTHER; note = N1-methylpseudouracil
  modified_base 2207: mod_base = OTHER; note = N1-methylpseudouracil
  modified_base 2210: mod_base = OTHER; note = N1-methylpseudouracil
  modified_base 2213: mod_base = OTHER; note = N1-methylpseudouracil
  modified_base 2219: mod_base = OTHER; note = N1-methylpseudouracil
  modified_base 2225: mod_base = OTHER; note = N1-methylpseudouracil
  modified_base 2231: mod_base = OTHER; note = N1-methylpseudouracil
  modified_base 2234: mod_base = OTHER; note = N1-methylpseudouracil
  modified_base 2237: mod_base = OTHER; note = N1-methylpseudouracil
  modified_base 2240: mod_base = OTHER; note = N1-methylpseudouracil
  modified_base 2246: mod_base = OTHER; note = N1-methylpseudouracil
  modified_base 2249: mod_base = OTHER; note = N1-methylpseudouracil
  modified_base 2252: mod_base = OTHER; note = N1-methylpseudouracil
  modified_base 2255: mod_base = OTHER; note = N1-methylpseudouracil
  modified_base 2257: mod_base = OTHER; note = N1-methylpseudouracil
  modified_base 2261: mod_base = OTHER; note = N1-methylpseudouracil
  modified_base 2263: mod_base = OTHER; note = N1-methylpseudouracil
  modified_base 2270: mod_base = OTHER; note = N1-methylpseudouracil
  modified_base 2273: mod_base = OTHER; note = N1-methylpseudouracil
  modified_base 2276: mod_base = OTHER; note = N1-methylpseudouracil
  modified_base 2278: mod_base = OTHER; note = N1-methylpseudouracil
  modified_base 2281: mod_base = OTHER; note = N1-methylpseudouracil
  modified_base 2282: mod_base = OTHER; note = N1-methylpseudouracil
  modified_base 2300: mod_base = OTHER; note = N1-methylpseudouracil
  modified_base 2308: mod_base = OTHER; note = N1-methylpseudouracil
  modified_base 2309: mod_base = OTHER; note = N1-methylpseudouracil
  modified_base 2323: mod_base = OTHER; note = N1-methylpseudouracil
  modified_base 2325: mod_base = OTHER; note = N1-methylpseudouracil
  modified_base 2335: mod_base = OTHER; note = N1-methylpseudouracil
  modified_base 2355: mod_base = OTHER; note = N1-methylpseudouracil
  modified_base 2357: mod_base = OTHER; note = N1-methylpseudouracil
  modified_base 2359: mod_base = OTHER; note = N1-methylpseudouracil
  modified_base 2368: mod_base = OTHER; note = N1-methylpseudouracil
  modified_base 2380: mod_base = OTHER; note = N1-methylpseudouracil
  modified_base 2381: mod_base = OTHER; note = N1-methylpseudouracil
  modified_base 2390: mod_base = OTHER; note = N1-methylpseudouracil
  modified_base 2395: mod_base = OTHER; note = N1-methylpseudouracil
  modified_base 2420: mod_base = OTHER; note = N1-methylpseudouracil
  modified_base 2426: mod_base = OTHER; note = N1-methylpseudouracil
  modified_base 2428: mod_base = OTHER; note = N1-methylpseudouracil
  modified_base 2437: mod_base = OTHER; note = N1-methylpseudouracil
  modified_base 2439: mod_base = OTHER; note = N1-methylpseudouracil
  modified_base 2450: mod_base = OTHER; note = N1-methylpseudouracil
  modified_base 2457: mod_base = OTHER; note = N1-methylpseudouracil
  modified_base 2462: mod_base = OTHER; note = N1-methylpseudouracil
  modified_base 2465: mod_base = OTHER; note = N1-methylpseudouracil
  modified_base 2471: mod_base = OTHER; note = N1-methylpseudouracil
  modified_base 2476: mod_base = OTHER; note = N1-methylpseudouracil
  modified_base 2482: mod_base = OTHER; note = N1-methylpseudouracil
  modified_base 2485: mod_base = OTHER; note = N1-methylpseudouracil
  modified_base 2488: mod_base = OTHER; note = N1-methylpseudouracil
  modified_base 2493: mod_base = OTHER; note = N1-methylpseudouracil
  modified_base 2500: mod_base = OTHER; note = N1-methylpseudouracil
  modified_base 2504: mod_base = OTHER; note = N1-methylpseudouracil
  modified_base 2509: mod_base = OTHER; note = N1-methylpseudouracil
  modified_base 2513: mod_base = OTHER; note = N1-methylpseudouracil
  modified_base 2514: mod_base = OTHER; note = N1-methylpseudouracil
  modified_base 2516: mod_base = OTHER; note = N1-methylpseudouracil
  modified_base 2517: mod_base = OTHER; note = N1-methylpseudouracil
  modified_base 2523: mod_base = OTHER; note = N1-methylpseudouracil
  modified_base 2524: mod_base = OTHER; note = N1-methylpseudouracil
  modified_base 2530: mod_base = OTHER; note = N1-methylpseudouracil
  modified_base 2543: mod_base = OTHER; note = N1-methylpseudouracil
  modified_base 2546: mod_base = OTHER; note = N1-methylpseudouracil
  modified_base 2551: mod_base = OTHER; note = N1-methylpseudouracil
  modified_base 2552: mod_base = OTHER; note = N1-methylpseudouracil
  modified_base 2555: mod_base = OTHER; note = N1-methylpseudouracil
  modified_base 2563: mod_base = OTHER; note = N1-methylpseudouracil
  modified_base 2579: mod_base = OTHER; note = N1-methylpseudouracil
  modified_base 2580: mod_base = OTHER; note = N1-methylpseudouracil
  modified_base 2582: mod_base = OTHER; note = N1-methylpseudouracil
  modified_base 2588: mod_base = OTHER; note = N1-methylpseudouracil
  modified_base 2593: mod_base = OTHER; note = N1-methylpseudouracil
  modified_base 2596: mod_base = OTHER; note = N1-methylpseudouracil
  modified_base 2598: mod_base = OTHER; note = N1-methylpseudouracil
  modified_base 2599: mod_base = OTHER; note = N1-methylpseudouracil
  modified_base 2600: mod_base = OTHER; note = N1-methylpseudouracil
  modified_base 2604: mod_base = OTHER; note = N1-methylpseudouracil
  modified_base 2609: mod_base = OTHER; note = N1-methylpseudouracil
  modified_base 2611: mod_base = OTHER; note = N1-methylpseudouracil
  modified_base 2615: mod_base = OTHER; note = N1-methylpseudouracil
ggaaatcgcaaaatttgctcttcgcgttagatttcttttagttttctcgcaactagcaagctttttgttctcgccatggggatcgagctgctgtgcctgttcttcctgttcctgggacggaacgaccacgtgcagggtggctgcgcccttggtggggcagagacctgcgaggactgcctgctcatcggcccacagtgcgcctggtgcgctcaggagaacttcacccaccccagcggagtgggcgagaggtgcgacaccccggccaacctgctggccaaggggtgccagctgaacttcatcgagaaccccgtctctcaggtggagatcctgaagaacaagcccctcagcgttgggcggcagaagaacagctctgacatcgtgcagatcgcgccccagagcctgatcctgaaactacggcctggcggtgcgcaaaccctgcaggtccacgtgcggcagaccgaggactaccctgtggacctgtactacctgatggacctctcctacagcatggacgacgatctgaacaccatcaaggagctgggcagccgcctgagcaaggagatgtccaagctgacctccaacttccgcctggggttcggatccttcgtggagaagcccgtgagccccttcgtgaagaccacccctgaggagatcgccaacccctgcagcagcatcccttacttctgcctgcccaccttcggcttcaagcacatcctgccactgaccaacgacgccgagcggttcaacgagatcgtgaagaaccagaagatcagcagaaacatcgacgccccggagggtgggttcgacgctatcatgcaggccgccgtgtgcaaggagaagatcggctggcgcaacgacagcctgcacctgctggtgttcgtgtccgacgccgactcccacttcggcatggacagcaagctggccggtatcgtgatccctaacgacggcctgtgccacctggacagcaagaacgagtacagcatgagcaccgtgctggagtaccccaccatcggccagctgatcgacaagctggtgcagaacaacgtgctgctgatcttcgccgtgacccaggagcaggtgcacctctacgagaactacgccaagctgattccaggcgccaccgtcggtctgctgcagaaggacagcggcaacatcctgcagctgatcatctccgcctacgaggagctgaggagcgaggtggagctggaggtgctcggggacaccgagggcctgaacctgtccttcaccgccatctgcaacaacgggaccctcttccagcaccagaagaagtgcagccacatgaaggtgggcgacaccgccagcttcagcgtcaccgtgaacatacctcactgtgagcggcggagcaggcacatcatcatcaagcccgtgggcctgggagacgccctggagctgctggtgtctcccgagtgcaactgcgactgccagaaggaggtggaggtgaactctagcaagtgccaccacggcaacgggagtttccagtgtggcgtgtgtgcctgccaccccggtcacatgggaccccggtgtgagtgcggggaggacatgctgagcaccgacagctgcaaggaggccccagaccacccgagctgttccggtcggggcgactgctactgcggccagtgcatctgtcacctgagcccctacggcaacatctacgggccctactgccagtgcgacaacttctcctgcgtgcgccacaaaggcctgctgtgtggcggcaacggcgactgcgactgcggggagtgcgtgtgccgcagtgggtggaccggcgagtactgcaactgcaccacctccaccgactcttgcgtgtccgaggacggggtgctgtgttccgggcgcggagattgcgtgtgcgggaagtgcgtgtgcaccaaccctggcgcatcgggtcctacctgcgagaggtgccccacctgtggcgacccctgcaacagcaagcgctcttgcatcgagtgccacctctcagcagcagggcaggctcgggaggagtgcgtggacaagtgcaagctcgccggcgccaccatcagtgaggaggaggacttctccaaggacggcagcgtgtcctgctccctccagggcgagaacgagtgcctcatcaccttcctgatcaccaccgacaacgagggcaagaccatcatccactccatcaacgagaaggactgccccaagccgcctaacatccccatgatcatgctgggcgtgagcctggccatcctgctgatcggcgtggtgctgctgtgcatctggaagctgctggtctccttccacgaccgcaaggaggtggccaagttcgaggccgagcgctctaaggccaagtggcagaccggcaccaaccctctgtaccggggctccaccagcaccttcaagaacgtgacctacaagcaccgcgagaagcagaaggtggacctgtccaccgactgtggcaagcccatccccaatcccctgctggggctggactccacctgataataggctggagcctcggtggcctagcttcttgccccttgggcctccccccagcccctcctccccttcctgcacccgtaccccccaaacaccattgtcacactccagtggtctttgaataaagtctgagtgggcggc

SEQ ID NO: 173 - RNA, 2619 nt, unidentified
  source 1..2619: mol_type = unassigned RNA
  modified_base 6: mod_base = OTHER; note = N1-methylpseudouracil
  modified_base 14: mod_base = OTHER; note = N1-methylpseudouracil
  modified_base 15: mod_base = OTHER; note = N1-methylpseudouracil
  modified_base 16: mod_base = OTHER; note = N1-methylpseudouracil
  modified_base 19: mod_base = OTHER; note = N1-methylpseudouracil
  modified_base 21: mod_base = OTHER; note = N1-methylpseudouracil
  modified_base 22: mod_base = OTHER; note = N1-methylpseudouracil
  modified_base 27: mod_base = OTHER; note = N1-methylpseudouracil
  modified_base 28: mod_base = OTHER; note = N1-methylpseudouracil
  modified_base 32: mod_base = OTHER; note = N1-methylpseudouracil
  modified_base 33: mod_base = OTHER; note = N1-methylpseudouracil
  modified_base 34: mod_base = OTHER; note = N1-methylpseudouracil
  modified_base 36: mod_base = OTHER; note = N1-methylpseudouracil
  modified_base 37: mod_base = OTHER; note = N1-methylpseudouracil
  modified_base 38: mod_base = OTHER; note = N1-methylpseudouracil
  modified_base 39: mod_base = OTHER; note = N1-methylpseudouracil
  modified_base 42: mod_base = OTHER; note = N1-methylpseudouracil
  modified_base 43: mod_base = OTHER; note = N1-methylpseudouracil
  modified_base 44: mod_base = OTHER; note = N1-methylpseudouracil
  modified_base 45: mod_base = OTHER; note = N1-methylpseudouracil
  modified_base 47: mod_base = OTHER; note = N1-methylpseudouracil
  modified_base 54: mod_base = OTHER; note = N1-methylpseudouracil
  modified_base 62: mod_base = OTHER; note = N1-methylpseudouracil
  modified_base 63: mod_base = OTHER; note = N1-methylpseudouracil
  modified_base 64: mod_base = OTHER; note = N1-methylpseudouracil
  modified_base 65: mod_base = OTHER; note = N1-methylpseudouracil
  modified_base 66: mod_base = OTHER; note = N1-methylpseudouracil
  modified_base 68: mod_base = OTHER; note = N1-methylpseudouracil
  modified_base 69: mod_base = OTHER; note = N1-methylpseudouracil
  modified_base 71: mod_base = OTHER; note = N1-methylpseudouracil
  modified_base 77: mod_base = OTHER; note = N1-methylpseudouracil
  modified_base 83: mod_base = OTHER; note = N1-methylpseudouracil
  modified_base 89: mod_base = OTHER; note = N1-methylpseudouracil
  modified_base 92: mod_base = OTHER; note = N1-methylpseudouracil
  modified_base 94: mod_base = OTHER; note = N1-methylpseudouracil
  modified_base 98: mod_base = OTHER; note = N1-methylpseudouracil
  modified_base 100: mod_base = OTHER; note = N1-methylpseudouracil
  modified_base 101: mod_base = OTHER; note = N1-methylpseudouracil
  modified_base 104: mod_base = OTHER; note = N1-methylpseudouracil
  modified_base 106: mod_base = OTHER; note = N1-methylpseudouracil
  modified_base 107: mod_base = OTHER; note = N1-methylpseudouracil
  modified_base 110: mod_base = OTHER; note = N1-methylpseudouracil
  modified_base 113: mod_base = OTHER; note = N1-methylpseudouracil
  modified_base 131: mod_base = OTHER; note = N1-methylpseudouracil
  modified_base 142: mod_base = OTHER; note = N1-methylpseudouracil
  modified_base 148: mod_base = OTHER; note = N1-methylpseudouracil
  modified_base 166: mod_base = OTHER; note = N1-methylpseudouracil
  modified_base 175: mod_base = OTHER; note = N1-methylpseudouracil
  modified_base 179: mod_base = OTHER; note = N1-methylpseudouracil
  modified_base 182: mod_base = OTHER; note = N1-methylpseudouracil
  modified_base 192: mod_base = OTHER; note = N1-methylpseudouracil
  modified_base 196: mod_base = OTHER; note = N1-methylpseudouracil
  modified_base 201: mod_base = OTHER; note = N1-methylpseudouracil
  modified_base 202: mod_base = OTHER; note = N1-methylpseudouracil
  modified_base 205: mod_base = OTHER; note = N1-methylpseudouracil
  modified_base 220: mod_base = OTHER; note = N1-methylpseudouracil
  modified_base 221: mod_base = OTHER; note = N1-methylpseudouracil
  modified_base 230: mod_base = OTHER; note = N1-methylpseudouracil
  modified_base 232: mod_base = OTHER; note = N1-methylpseudouracil
  modified_base 240: mod_base = OTHER; note = N1-methylpseudouracil
  modified_base 250: mod_base = OTHER; note = N1-methylpseudouracil
  modified_base 261: mod_base = OTHER; note = N1-methylpseudouracil
  modified_base 269: mod_base = OTHER; note = N1-methylpseudouracil
  modified_base 272: mod_base = OTHER; note = N1-methylpseudouracil
  modified_base 283: mod_base = OTHER; note = N1-methylpseudouracil
  modified_base 290: mod_base = OTHER; note = N1-methylpseudouracil
  modified_base 294: mod_base = OTHER; note = N1-methylpseudouracil
  modified_base 295: mod_base = OTHER; note = N1-methylpseudouracil
  modified_base 296: mod_base = OTHER; note = N1-methylpseudouracil
  modified_base 299: mod_base = OTHER; note = N1-methylpseudouracil
  modified_base 309: mod_base = OTHER; note = N1-methylpseudouracil
  modified_base 311: mod_base = OTHER; note = N1-methylpseudouracil
  modified_base 320: mod_base = OTHER; note = N1-methylpseudouracil
  modified_base 326: mod_base = OTHER; note = N1-methylpseudouracil
  modified_base 329: mod_base = OTHER; note = N1-methylpseudouracil
  modified_base 342: mod_base = OTHER; note = N1-methylpseudouracil
  modified_base 344: mod_base = OTHER; note = N1-methylpseudouracil
  modified_base 350: mod_base = OTHER; note = N1-methylpseudouracil
  modified_base 377: mod_base = OTHER; note = N1-methylpseudouracil
  modified_base 380: mod_base = OTHER; note = N1-methylpseudouracil
  modified_base 386: mod_base = OTHER; note = N1-methylpseudouracil
  modified_base 393: mod_base = OTHER; note = N1-methylpseudouracil
  modified_base 399: mod_base = OTHER; note = N1-methylpseudouracil
  modified_base 401: mod_base = OTHER; note = N1-methylpseudouracil
  modified_base 404: mod_base = OTHER; note = N1-methylpseudouracil
  modified_base 405: mod_base = OTHER; note = N1-methylpseudouracil
  modified_base 407: mod_base = OTHER; note = N1-methylpseudouracil
  modified_base 413: mod_base = OTHER; note = N1-methylpseudouracil
  modified_base 414: mod_base = OTHER; note = N1-methylpseudouracil
  modified_base 420: mod_base = OTHER; note = N1-methylpseudouracil
  modified_base 437: mod_base = OTHER; note = N1-methylpseudouracil
  modified_base 443: mod_base = OTHER; note = N1-methylpseudouracil
  modified_base 449: mod_base = OTHER; note = N1-methylpseudouracil
  modified_base 466: mod_base = OTHER; note = N1-methylpseudouracil
  modified_base 471: mod_base = OTHER; note = N1-methylpseudouracil
  modified_base 473: mod_base = OTHER; note = N1-methylpseudouracil
  modified_base 479: mod_base = OTHER; note = N1-methylpseudouracil
  modified_base 481: mod_base = OTHER; note = N1-methylpseudouracil
  modified_base 484: mod_base = OTHER; note = N1-methylpseudouracil
  modified_base 488: mod_base = OTHER; note = N1-methylpseudouracil
  modified_base 491: mod_base = OTHER; note = N1-methylpseudouracil
  modified_base 496: mod_base = OTHER; note = N1-methylpseudouracil
  modified_base 497: mod_base = OTHER; note = N1-methylpseudouracil
  modified_base 499: mod_base = OTHER; note = N1-methylpseudouracil
  modified_base 509: mod_base = OTHER; note = N1-methylpseudouracil
  modified_base 521: mod_base = OTHER; note = N1-methylpseudouracil
  modified_base 530: mod_base = OTHER; note = N1-methylpseudouracil
  modified_base 539: mod_base = OTHER; note = N1-methylpseudouracil
  modified_base 551: mod_base = OTHER; note = N1-methylpseudouracil
  modified_base 552: mod_base = OTHER; note = N1-methylpseudouracil
  modified_base 563: mod_base = OTHER; note = N1-methylpseudouracil
  modified_base 572: mod_base = OTHER; note = N1-methylpseudouracil
  modified_base 583: mod_base = OTHER; note = N1-methylpseudouracil
  modified_base 584: mod_base = OTHER; note = N1-methylpseudouracil
  modified_base 590: mod_base = OTHER; note = N1-methylpseudouracil
  modified_base 595: mod_base = OTHER; note = N1-methylpseudouracil
  modified_base 596: mod_base = OTHER; note = N1-methylpseudouracil
  modified_base 604: mod_base = OTHER; note = N1-methylpseudouracil
  modified_base 605: mod_base = OTHER; note = N1-methylpseudouracil
  modified_base 608: mod_base = OTHER; note = N1-methylpseudouracil
  modified_base 620: mod_base = OTHER; note = N1-methylpseudouracil
  modified_base 621: mod_base = OTHER; note = N1-methylpseudouracil
  modified_base 624: mod_base = OTHER; note = N1-methylpseudouracil
  modified_base 627: mod_base = OTHER; note = N1-methylpseudouracil
  modified_base 628: mod_base = OTHER; note = N1-methylpseudouracil
  modified_base 629: mod_base = OTHER; note = N1-methylpseudouracil
  modified_base 632: mod_base = OTHER; note = N1-methylpseudouracil
  modified_base 653: mod_base = OTHER; note = N1-methylpseudouracil
  modified_base 663: mod_base = OTHER; note = N1-methylpseudouracil
  modified_base 664: mod_base = OTHER; note = N1-methylpseudouracil
  modified_base 674: mod_base = OTHER; note = N1-methylpseudouracil
  modified_base 678: mod_base = OTHER; note = N1-methylpseudouracil
  modified_base 679: mod_base = OTHER; note = N1-methylpseudouracil
  modified_base 682: mod_base = OTHER; note = N1-methylpseudouracil
  modified_base 683: mod_base = OTHER; note = N1-methylpseudouracil
  modified_base 685: mod_base = OTHER; note = N1-methylpseudouracil
  modified_base 689: mod_base = OTHER; note = N1-methylpseudouracil
  modified_base 693: mod_base = OTHER; note = N1-methylpseudouracil
  modified_base 697: mod_base = OTHER; note = N1-methylpseudouracil
  modified_base 698: mod_base = OTHER; note = N1-methylpseudouracil
  modified_base 703: mod_base = OTHER; note = N1-methylpseudouracil
  modified_base 704: mod_base = OTHER; note = N1-methylpseudouracil
  modified_base 713: mod_base = OTHER; note = N1-methylpseudouracil
  modified_base 716: mod_base = OTHER; note = N1-methylpseudouracil
  modified_base 720: mod_base = OTHER; note = N1-methylpseudouracil
  modified_base 722: mod_base = OTHER; note = N1-methylpseudouracil
  modified_base 742: mod_base = OTHER; note = N1-methylpseudouracil
  modified_base 743: mod_base = OTHER; note = N1-methylpseudouracil
  modified_base 752: mod_base = OTHER; note = N1-methylpseudouracil
  modified_base 755: mod_base = OTHER; note = N1-methylpseudouracil
  modified_base 770: mod_base = OTHER; note = N1-methylpseudouracil
  modified_base 782: mod_base = OTHER; note = N1-methylpseudouracil
  modified_base 786: mod_base = OTHER; note = N1-methylpseudouracil
  modified_base 792: mod_base = OTHER; note = N1-methylpseudouracil
  modified_base 801: mod_base = OTHER; note = N1-methylpseudouracil
  modified_base 802: mod_base = OTHER; note = N1-methylpseudouracil
  modified_base 803: mod_base = OTHER; note = N1-methylpseudouracil
  modified_base 812: mod_base = OTHER; note = N1-methylpseudouracil
  modified_base 815: mod_base = OTHER; note = N1-methylpseudouracil
  modified_base 827: mod_base = OTHER; note = N1-methylpseudouracil
  modified_base 829: mod_base = OTHER; note = N1-methylpseudouracil
  modified_base 842: mod_base = OTHER; note = N1-methylpseudouracil
  modified_base 847: mod_base = OTHER; note = N1-methylpseudouracil
  modified_base 863: mod_base = OTHER; note = N1-methylpseudouracil
  modified_base 869: mod_base = OTHER; note = N1-methylpseudouracil
  modified_base 870: mod_base = OTHER; note = N1-methylpseudouracil
  modified_base 872: mod_base = OTHER; note = N1-methylpseudouracil
  modified_base 875: mod_base = OTHER; note = N1-methylpseudouracil
  modified_base 877: mod_base = OTHER; note = N1-methylpseudouracil
  modified_base 878: mod_base = OTHER; note = N1-methylpseudouracil
  modified_base 881: mod_base = OTHER; note = N1-methylpseudouracil
  modified_base 901: mod_base = OTHER; note = N1-methylpseudouracil
  modified_base 902: mod_base = OTHER; note = N1-methylpseudouracil
  modified_base 908: mod_base = OTHER; note = N1-methylpseudouracil
  modified_base 913: mod_base = OTHER; note = N1-methylpseudouracil
  modified_base 915: mod_base = OTHER; note = N1-methylpseudouracil
  modified_base 920: mod_base = OTHER; note = N1-methylpseudouracil
  modified_base 929: mod_base = OTHER; note = N1-methylpseudouracil
  modified_base 932: mod_base = OTHER; note = N1-methylpseudouracil
  modified_base 935: mod_base = OTHER; note = N1-methylpseudouracil
  modified_base 939: mod_base = OTHER; note = N1-methylpseudouracil
  modified_base 950: mod_base = OTHER; note = N1-methylpseudouracil
  modified_base 952: mod_base = OTHER; note = N1-methylpseudouracil
  modified_base 959: mod_base = OTHER; note = N1-methylpseudouracil
  modified_base 966: mod_base = OTHER; note = N1-methylpseudouracil
  modified_base 969: mod_base = OTHER; note = N1-methylpseudouracil
  modified_base 976: mod_base = OTHER; note = N1-methylpseudouracil
  modified_base 983: mod_base = OTHER; note = N1-methylpseudouracil
  modified_base 992: mod_base = OTHER; note = N1-methylpseudouracil
  modified_base 995: mod_base = OTHER; note = N1-methylpseudouracil
  modified_base 1000: mod_base = OTHER; note = N1-methylpseudouracil
  modified_base 1005: mod_base = OTHER; note = N1-methylpseudouracil
  modified_base 1010: mod_base = OTHER; note = N1-methylpseudouracil
  modified_base 1019: mod_base = OTHER; note = N1-methylpseudouracil
  modified_base 1022: mod_base = OTHER; note = N1-methylpseudouracil
  modified_base 1031: mod_base = OTHER; note = N1-methylpseudouracil
  modified_base 1032: mod_base = OTHER; note = N1-methylpseudouracil
  modified_base 1034: mod_base = OTHER; note = N1-methylpseudouracil
  modified_base 1041: mod_base = OTHER; note = N1-methylpseudouracil
  modified_base 1046: mod_base = OTHER; note = N1-methylpseudouracil
  modified_base 1049: mod_base = OTHER; note = N1-methylpseudouracil
  modified_base 1052: mod_base = OTHER; note = N1-methylpseudouracil
  modified_base 1055: mod_base = OTHER; note = N1-methylpseudouracil
  modified_base 1057: mod_base = OTHER; note = N1-methylpseudouracil
  modified_base 1058: mod_base = OTHER; note = N1-methylpseudouracil
  modified_base 1064: mod_base = OTHER; note = N1-methylpseudouracil
  modified_base 1079: mod_base = OTHER; note = N1-methylpseudouracil
  modified_base 1085: mod_base = OTHER; note = N1-methylpseudouracil
  modified_base 1087: mod_base = OTHER; note = N1-methylpseudouracil
  modified_base 1096: mod_base = OTHER; note = N1-methylpseudouracil
  modified_base 1106: mod_base = OTHER; note = N1-methylpseudouracil
  modified_base 1109: mod_base = OTHER; note = N1-methylpseudouracil
  modified_base 1113: mod_base = OTHER; note = N1-methylpseudouracil
  modified_base 1124: mod_base = OTHER; note = N1-methylpseudouracil
  modified_base 1130: mod_base = OTHER; note = N1-methylpseudouracil
  modified_base 1133: mod_base = OTHER; note = N1-methylpseudouracil
  modified_base 1154: mod_base = OTHER; note = N1-methylpseudouracil
  modified_base 1156: mod_base = OTHER; note = N1-methylpseudouracil
  modified_base 1157: mod_base = OTHER; note = N1-methylpseudouracil
  modified_base 1163: mod_base = OTHER; note = N1-methylpseudouracil
  modified_base 1166: mod_base = OTHER; note = N1-methylpseudouracil
  modified_base 1167: mod_base = OTHER; note = N1-methylpseudouracil
  modified_base 1169: mod_base = OTHER; note = N1-methylpseudouracil
  modified_base 1171: mod_base = OTHER; note = N1-methylpseudouracil
  modified_base 1177: mod_base = OTHER; note = N1-methylpseudouracil
  modified_base 1187: mod_base = OTHER; note = N1-methylpseudouracil
  modified_base 1199: mod_base = OTHER; note = N1-methylpseudouracil
  modified_base 1205: mod_base = OTHER; note = N1-methylpseudouracil
  modified_base 1211: mod_base = OTHER; note = N1-methylpseudouracil
  modified_base 1214: mod_base = OTHER; note = N1-methylpseudouracil
  modified_base 1232: mod_base = OTHER; note = N1-methylpseudouracil
  modified_base 1238: mod_base = OTHER; note = N1-methylpseudouracil
  modified_base 1243: mod_base = OTHER; note = N1-methylpseudouracil
  modified_base 1244: mod_base = OTHER; note = N1-methylpseudouracil
  modified_base 1253: mod_base = OTHER; note = N1-methylpseudouracil
  modified_base 1255: mod_base = OTHER; note = N1-methylpseudouracil
  modified_base 1268: mod_base = OTHER; note = N1-methylpseudouracil
  modified_base 1271: mod_base = OTHER; note = N1-methylpseudouracil
  modified_base 1273: mod_base = OTHER; note = N1-methylpseudouracil
  modified_base 1274: mod_base = OTHER; note = N1-methylpseudouracil
  modified_base 1278: mod_base = OTHER; note = N1-methylpseudouracil
  modified_base 1291: mod_base = OTHER; note = N1-methylpseudouracil
  modified_base 1293: mod_base = OTHER; note = N1-methylpseudouracil
  modified_base 1294: mod_base = OTHER; note = N1-methylpseudouracil
  modified_base 1301: mod_base = OTHER; note = N1-methylpseudouracil
  modified_base 1307: mod_base = OTHER; note = N1-methylpseudouracil
  modified_base 1311: mod_base = OTHER; note = N1-methylpseudouracil
  modified_base 1314: mod_base = OTHER; note = N1-methylpseudouracil
  modified_base 1321: mod_base = OTHER; note = N1-methylpseudouracil
  modified_base 1324: mod_base = OTHER; note = N1-methylpseudouracil
  modified_base 1325: mod_base = OTHER; note = N1-methylpseudouracil
  modified_base 1331: mod_base = OTHER; note = N1-methylpseudouracil
  modified_base 1337: mod_base = OTHER; note = N1-methylpseudouracil
  modified_base 1343: mod_base = OTHER; note = N1-methylpseudouracil
  modified_base 1344: mod_base = OTHER; note = N1-methylpseudouracil
  modified_base 1350: mod_base = OTHER; note = N1-methylpseudouracil
  modified_base 1351: mod_base = OTHER; note = N1-methylpseudouracil
  modified_base 1372: mod_base = OTHER; note = N1-methylpseudouracil
  modified_base 1373: mod_base = OTHER; note = N1-methylpseudouracil
  modified_base 1376: mod_base = OTHER; note = N1-methylpseudouracil
  modified_base 1379: mod_base = OTHER; note = N1-methylpseudouracil
  modified_base 1380: mod_base = OTHER; note = N1-methylpseudouracil
  modified_base 1386: mod_base = OTHER; note = N1-methylpseudouracil
  modified_base 1388: mod_base = OTHER; note = N1-methylpseudouracil
  modified_base 1394: mod_base = OTHER; note = N1-methylpseudouracil
  modified_base 1401: mod_base = OTHER; note = N1-methylpseudouracil
  modified_base 1404: mod_base = OTHER; note = N1-methylpseudouracil
  modified_base 1406: mod_base = OTHER; note = N1-methylpseudouracil
  modified_base 1407: mod_base = OTHER; note = N1-methylpseudouracil
  modified_base 1412: mod_base = OTHER; note = N1-methylpseudouracil
  modified_base 1415: mod_base = OTHER; note = N1-methylpseudouracil
  modified_base 1418: mod_base = OTHER; note = N1-methylpseudouracil
  modified_base 1429: mod_base = OTHER; note = N1-methylpseudouracil
  modified_base 1435: mod_base = OTHER; note = N1-methylpseudouracil
  modified_base 1437: mod_base = OTHER; note = N1-methylpseudouracil
  modified_base 1440: mod_base = OTHER; note = N1-methylpseudouracil
  modified_base 1441: mod_base = OTHER; note = N1-methylpseudouracil
  modified_base 1454: mod_base = OTHER; note = N1-methylpseudouracil
  modified_base 1464: mod_base = OTHER; note = N1-methylpseudouracil
  modified_base 1465: mod_base = OTHER; note = N1-methylpseudouracil
  modified_base 1467: mod_base = OTHER; note = N1-methylpseudouracil
  modified_base 1468: mod_base = OTHER; note = N1-methylpseudouracil
  modified_base 1474: mod_base = OTHER; note = N1-methylpseudouracil
  modified_base 1492: mod_base = OTHER; note = N1-methylpseudouracil
  modified_base 1495: mod_base = OTHER; note = N1-methylpseudouracil
  modified_base 1496: mod_base = OTHER; note = N1-methylpseudouracil
  modified_base 1501: mod_base = OTHER; note = N1-methylpseudouracil
  modified_base 1508: mod_base = OTHER; note = N1-methylpseudouracil
  modified_base 1510: mod_base = OTHER; note = N1-methylpseudouracil
  modified_base 1516: mod_base = OTHER; note = N1-methylpseudouracil
  modified_base 1524: mod_base = OTHER; note = N1-methylpseudouracil
  modified_base 1532: mod_base = OTHER; note = N1-methylpseudouracil
  modified_base 1539: mod_base = OTHER; note = N1-methylpseudouracil
  modified_base 1543: mod_base = OTHER; note = N1-methylpseudouracil
  modified_base 1549: mod_base = OTHER; note = N1-methylpseudouracil
  modified_base 1551: mod_base = OTHER; note = N1-methylpseudouracil
  modified_base 1562: mod_base = OTHER; note = N1-methylpseudouracil
  modified_base 1565: mod_base = OTHER; note = N1-methylpseudouracil
  modified_base 1566: mod_base = OTHER; note = N1-methylpseudouracil
  modified_base 1567: mod_base = OTHER; note = N1-methylpseudouracil
  modified_base 1569: mod_base = OTHER; note = N1-methylpseudouracil
  modified_base 1579: mod_base = OTHER; note = N1-methylpseudouracil
  modified_base 1599: mod_base = OTHER; note = N1-methylpseudouracil
  modified_base 1602: mod_base = OTHER; note = N1-methylpseudouracil
  modified_base 1606: mod_base = OTHER; note = N1-methylpseudouracil
  modified_base 1624: mod_base = OTHER; note = N1-methylpseudouracil
  modified_base 1627: mod_base = OTHER; note = N1-methylpseudouracil
  modified_base 1630: mod_base = OTHER; note = N1-methylpseudouracil
  modified_base 1639: mod_base = OTHER; note = N1-methylpseudouracil
  modified_base 1643: mod_base = OTHER; note = N1-methylpseudouracil
  modified_base 1645: mod_base = OTHER; note = N1-methylpseudouracil
  modified_base 1650: mod_base = OTHER; note = N1-methylpseudouracil
  modified_base 1652: mod_base = OTHER; note = N1-methylpseudouracil
  modified_base 1656: mod_base = OTHER; note = N1-methylpseudouracil
  modified_base 1659: mod_base = OTHER; note = N1-methylpseudouracil
  modified_base 1660: mod_base = OTHER; note = N1-methylpseudouracil
  modified_base 1670: mod_base = OTHER; note = N1-methylpseudouracil
  modified_base 1672: mod_base = OTHER; note = N1-methylpseudouracil
  modified_base 1680: mod_base = OTHER; note = N1-methylpseudouracil
  modified_base 1681: mod_base = OTHER; note = N1-methylpseudouracil
  modified_base 1684: mod_base = OTHER; note = N1-methylpseudouracil
  modified_base 1686: mod_base = OTHER; note = N1-methylpseudouracil
  modified_base 1690: mod_base = OTHER; note = N1-methylpseudouracil
  modified_base 1695: mod_base = OTHER; note = N1-methylpseudouracil
  modified_base 1699: mod_base = OTHER; note = N1-methylpseudouracil
  modified_base 1700: mod_base = OTHER; note = N1-methylpseudouracil
  modified_base 1702: mod_base = OTHER; note = N1-methylpseudouracil
  modified_base 1705: mod_base = OTHER; note = N1-methylpseudouracil
  modified_base 1709: mod_base = OTHER; note = N1-methylpseudouracil
  modified_base 1722: mod_base = OTHER; note = N1-methylpseudouracil
  modified_base 1723: mod_base = OTHER; note = N1-methylpseudouracil
  modified_base 1724: mod_base = OTHER; note = N1-methylpseudouracil
  modified_base 1727: mod_base = OTHER; note = N1-methylpseudouracil
  modified_base 1729: mod_base = OTHER; note = N1-methylpseudouracil
  modified_base 1734: mod_base = OTHER; note = N1-methylpseudouracil
  modified_base 1746: mod_base = OTHER; note = N1-methylpseudouracil
  modified_base 1747: mod_base = OTHER; note = N1-methylpseudouracil
  modified_base 1749: mod_base = OTHER; note = N1-methylpseudouracil
  modified_base 1753: mod_base = OTHER; note = N1-methylpseudouracil
  modified_base 1762: mod_base = OTHER; note = N1-methylpseudouracil
  modified_base 1766: mod_base = OTHER; note = N1-methylpseudouracil
  modified_base 1768: mod_base = OTHER; note = N1-methylpseudouracil
  modified_base 1770: mod_base = OTHER; note = N1-methylpseudouracil
  modified_base 1780: mod_base = OTHER; note = N1-methylpseudouracil
  modified_base 1792: mod_base = OTHER; note = N1-methylpseudouracil
  modified_base 1795: mod_base = OTHER; note = N1-methylpseudouracil
  modified_base 1801: mod_base = OTHER; note = N1-methylpseudouracil
  modified_base 1822: mod_base = OTHER; note = N1-methylpseudouracil
  modified_base 1841: mod_base = OTHER; note = N1-methylpseudouracil
  modified_base 1843: mod_base = OTHER; note = N1-methylpseudouracil
  modified_base 1844: mod_base = OTHER; note = N1-methylpseudouracil
  modified_base 1846: mod_base = OTHER; note = N1-methylpseudouracil
  modified_base 1848: mod_base = OTHER; note = N1-methylpseudouracil
  modified_base 1849: mod_base = OTHER; note = N1-methylpseudouracil
  modified_base 1851: mod_base = OTHER; note = N1-methylpseudouracil
  modified_base 1857: mod_base = OTHER; note = N1-methylpseudouracil
  modified_base 1860: mod_base = OTHER; note = N1-methylpseudouracil
  modified_base 1863: mod_base = OTHER; note = N1-methylpseudouracil
  modified_base 1864: mod_base = OTHER; note = N1-methylpseudouracil
  modified_base 1866: mod_base = OTHER; note = N1-methylpseudouracil
  modified_base 1868: mod_base = OTHER; note = N1-methylpseudouracil
  modified_base 1870: mod_base = OTHER; note = N1-methylpseudouracil
  modified_base 1872: mod_base = OTHER; note = N1-methylpseudouracil
  modified_base 1879: mod_base = OTHER; note = N1-methylpseudouracil
  modified_base 1883: mod_base = OTHER; note = N1-methylpseudouracil
  modified_base 1885: mod_base = OTHER; note = N1-methylpseudouracil
  modified_base 1911: mod_base = OTHER; note = N1-methylpseudouracil
  modified_base 1915: mod_base = OTHER; note = N1-methylpseudouracil
  modified_base 1917: mod_base = OTHER; note = N1-methylpseudouracil
  modified_base 1924: mod_base = OTHER; note = N1-methylpseudouracil
  modified_base 1932: mod_base = OTHER; note = N1-methylpseudouracil
  modified_base 1933: mod_base = OTHER; note = N1-methylpseudouracil
  modified_base 1935: mod_base = OTHER; note = N1-methylpseudouracil
  modified_base 1941: mod_base = OTHER; note = N1-methylpseudouracil
  modified_base 1944: mod_base = OTHER; note = N1-methylpseudouracil
  modified_base 1945: mod_base = OTHER; note = N1-methylpseudouracil
  modified_base 1950: mod_base = OTHER; note = N1-methylpseudouracil
  modified_base 1951: mod_base = OTHER; note = N1-methylpseudouracil
  modified_base 1956: mod_base = OTHER; note = N1-methylpseudouracil
  modified_base 1963: mod_base = OTHER; note = N1-methylpseudouracil
  modified_base 1967: mod_base = OTHER; note = N1-methylpseudouracil
  modified_base 1972: mod_base = OTHER; note = N1-methylpseudouracil
  modified_base 1975: mod_base = OTHER; note = N1-methylpseudouracil
  modified_base 1978: mod_base = OTHER; note = N1-methylpseudouracil
  modified_base 1979: mod_base = OTHER; note = N1-methylpseudouracil
  modified_base 1986: mod_base = OTHER; note = N1-methylpseudouracil
  modified_base 2008: mod_base = OTHER; note = N1-methylpseudouracil
  modified_base 2016: mod_base = OTHER; note = N1-methylpseudouracil
  modified_base 2020: mod_base = OTHER; note = N1-methylpseudouracil
  modified_base 2040: mod_base = OTHER; note = N1-methylpseudouracil
  modified_base 2042: mod_base = OTHER; note = N1-methylpseudouracil
  modified_base 2044: mod_base = OTHER; note = N1-methylpseudouracil
  modified_base 2046: mod_base = OTHER; note = N1-methylpseudouracil
  modified_base 2056: mod_base = OTHER; note = N1-methylpseudouracil
  modified_base 2057: mod_base = OTHER; note = N1-methylpseudouracil
  modified_base 2075: mod_base = OTHER; note = N1-methylpseudouracil
  modified_base 2079: mod_base = OTHER; note = N1-methylpseudouracil
  modified_base 2080: mod_base = OTHER; note = N1-methylpseudouracil
  modified_base 2085: mod_base = OTHER; note = N1-methylpseudouracil
  modified_base 2086: mod_base = OTHER; note = N1-methylpseudouracil
  modified_base 2087: mod_base = OTHER; note = N1-methylpseudouracil
  modified_base 2104: mod_base = OTHER; note = N1-methylpseudouracil
  modified_base 2108: mod_base = OTHER; note = N1-methylpseudouracil
  modified_base 2111: mod_base = OTHER; note = N1-methylpseudouracil
  modified_base 2116: mod_base = OTHER; note = N1-methylpseudouracil
  modified_base 2117: mod_base = OTHER; note = N1-methylpseudouracil
  modified_base 2120: mod_base = OTHER; note = N1-methylpseudouracil
  modified_base 2123: mod_base = OTHER; note = N1-methylpseudouracil
  modified_base 2150: mod_base = OTHER; note = N1-methylpseudouracil
  modified_base 2153: mod_base = OTHER; note = N1-methylpseudouracil
  modified_base 2160: mod_base = OTHER; note = N1-methylpseudouracil
  modified_base 2162: mod_base = OTHER; note = N1-methylpseudouracil
  modified_base 2163: mod_base = OTHER; note = N1-methylpseudouracil
  modified_base 2176: mod_base = OTHER; note = N1-methylpseudouracil
  modified_base 2181: mod_base = OTHER; note = N1-methylpseudouracil
  modified_base 2187: mod_base = OTHER; note = N1-methylpseudouracil
  modified_base 2190: mod_base = OTHER; note = N1-methylpseudouracil
  modified_base 2195: mod_base = OTHER; note = N1-methylpseudouracil
  modified_base 2199: mod_base = OTHER; note = N1-methylpseudouracil
  modified_base 2201: mod_base = OTHER; note = N1-methylpseudouracil
  modified_base 2204: mod_base = OTHER; note = N1-methylpseudouracil
  modified_base 2207: mod_base = OTHER; note = N1-methylpseudouracil
  modified_base 2210: mod_base = OTHER; note = N1-methylpseudouracil
  modified_base 2216: mod_base = OTHER; note = N1-methylpseudouracil
  modified_base 2221: mod_base = OTHER; note = N1-methylpseudouracil
  modified_base 2222: mod_base = OTHER; note = N1-methylpseudouracil
  modified_base 2226: mod_base = OTHER; note = N1-methylpseudouracil
  modified_base 2228: mod_base = OTHER; note = N1-methylpseudouracil
  modified_base 2231: mod_base = OTHER; note = N1-methylpseudouracil
  modified_base 2234: mod_base = OTHER; note = N1-methylpseudouracil
  modified_base 2235: mod_base = OTHER; note = N1-methylpseudouracil
  modified_base 2237: mod_base = OTHER; note = N1-methylpseudouracil
  modified_base 2243: mod_base = OTHER; note = N1-methylpseudouracil
  modified_base 2246: mod_base = OTHER; note = N1-methylpseudouracil
  modified_base 2248: mod_base = OTHER; note = N1-methylpseudouracil
  modified_base 2249: mod_base = OTHER; note = N1-methylpseudouracil
  modified_base 2252: mod_base = OTHER; note = N1-methylpseudouracil
  modified_base 2254: mod_base = OTHER; note = N1-methylpseudouracil
  modified_base 2256: mod_base = OTHER; note = N1-methylpseudouracil
  modified_base 2258: mod_base = OTHER; note = N1-methylpseudouracil
  modified_base 2260: mod_base = OTHER; note = N1-methylpseudouracil
  modified_base 2267: mod_base = OTHER; note = N1-methylpseudouracil
  modified_base 2270: mod_base = OTHER; note = N1-methylpseudouracil
  modified_base 2273: mod_base = OTHER; note = N1-methylpseudouracil
  modified_base 2277: mod_base = OTHER; note = N1-methylpseudouracil
  modified_base 2278: mod_base = OTHER; note = N1-methylpseudouracil
  modified_base 2279: mod_base = OTHER; note = N1-methylpseudouracil
  modified_base 2297: mod_base = OTHER; note = N1-methylpseudouracil
  modified_base 2305: mod_base = OTHER; note = N1-methylpseudouracil
  modified_base 2306: mod_base = OTHER; note = N1-methylpseudouracil
  modified_base 2313: mod_base = OTHER; note = N1-methylpseudouracil
  modified_base 2320: mod_base = OTHER; note = N1-methylpseudouracil
  modified_base 2322: mod_base = OTHER; note = N1-methylpseudouracil
  modified_base 2332: mod_base = OTHER; note = N1-methylpseudouracil
  modified_base 2349: mod_base = OTHER; note = N1-methylpseudouracil
  modified_base 2352: mod_base = OTHER; note = N1-methylpseudouracil
  modified_base 2354: mod_base = OTHER; note = N1-methylpseudouracil
  modified_base 2356: mod_base = OTHER; note = N1-methylpseudouracil
  modified_base 2377: mod_base = OTHER; note = N1-methylpseudouracil
  modified_base 2378: mod_base = OTHER; note = N1-methylpseudouracil
  modified_base 2387: mod_base = OTHER; note = N1-methylpseudouracil
  modified_base 2392: mod_base = OTHER; note = N1-methylpseudouracil
  modified_base 2417: mod_base = OTHER; note = N1-methylpseudouracil
  modified_base 2423: mod_base = OTHER; note = N1-methylpseudouracil
  modified_base 2427: mod_base = OTHER; note = N1-methylpseudouracil
  modified_base 2445: mod_base = OTHER; note = N1-methylpseudouracil
  modified_base 2447: mod_base = OTHER; note = N1-methylpseudouracil
  modified_base 2448: mod_base = OTHER; note = N1-methylpseudouracil
  modified_base 2459: mod_base = OTHER; note = N1-methylpseudouracil
  modified_base 2462: mod_base = OTHER; note = N1-methylpseudouracil
  modified_base 2466: mod_base = OTHER; note = N1-methylpseudouracil
  modified_base 2468: mod_base = OTHER; note = N1-methylpseudouracil
  modified_base 2473: mod_base = OTHER; note = N1-methylpseudouracil
  modified_base 2479: mod_base = OTHER; note = N1-methylpseudouracil
  modified_base 2482: mod_base = OTHER; note = N1-methylpseudouracil
  modified_base 2485: mod_base = OTHER; note = N1-methylpseudouracil
  modified_base 2490: mod_base = OTHER; note = N1-methylpseudouracil
  modified_base 2497: mod_base = OTHER; note = N1-methylpseudouracil
  modified_base 2501: mod_base = OTHER; note = N1-methylpseudouracil
  modified_base 2506: mod_base = OTHER; note = N1-methylpseudouracil
  modified_base 2510: mod_base = OTHER; note = N1-methylpseudouracil
  modified_base 2511: mod_base = OTHER; note = N1-methylpseudouracil
  modified_base 2513: mod_base = OTHER; note = N1-methylpseudouracil
  modified_base 2514: mod_base = OTHER; note = N1-methylpseudouracil
  modified_base 2520: mod_base = OTHER; note = N1-methylpseudouracil
  modified_base 2521: mod_base = OTHER; note = N1-methylpseudouracil
  modified_base 2527: mod_base = OTHER; note = N1-methylpseudouracil
  modified_base 2540: mod_base = OTHER; note = N1-methylpseudouracil
  modified_base 2543: mod_base = OTHER; note = N1-methylpseudouracil
  modified_base 2548: mod_base = OTHER; note = N1-methylpseudouracil
  modified_base 2549: mod_base = OTHER; note = N1-methylpseudouracil
  modified_base 2552: mod_base = OTHER; note = N1-methylpseudouracil
  modified_base 2560: mod_base = OTHER; note = N1-methylpseudouracil
  modified_base 2576: mod_base = OTHER; note = N1-methylpseudouracil
  modified_base 2577: mod_base = OTHER; note = N1-methylpseudouracil
  modified_base 2579: mod_base = OTHER; note = N1-methylpseudouracil
  modified_base 2585: mod_base = OTHER; note = N1-methylpseudouracil
  modified_base 2590: mod_base = OTHER; note = N1-methylpseudouracil
  modified_base 2593: mod_base = OTHER; note = N1-methylpseudouracil
  modified_base 2595: mod_base = OTHER; note = N1-methylpseudouracil
  modified_base 2596: mod_base = OTHER; note = N1-methylpseudouracil
  modified_base 2597: mod_base = OTHER; note = N1-methylpseudouracil
  modified_base 2601: mod_base = OTHER; note = N1-methylpseudouracil
  modified_base 2606: mod_base = OTHER; note = N1-methylpseudouracil
  modified_base 2608: mod_base = OTHER; note = N1-methylpseudouracil
  modified_base 2612: mod_base = OTHER; note = N1-methylpseudouracil
ggaaatcgcaaaatttgctcttcgcgttagatttcttttagttttctcgcaactagcaagctttttgttctcgccatgggcatcgagctggtgtgcctgttcctgttactactgggcagaaacgaccacgtgcagggcggctgcgcctggagcggcgccgaaacctgcagcgactgcctgctgaccggccctcactgcgcttggtgcagccaggagaacttcacccacctctcaggcgctggcgagcggtgcgacacccctgagaacctgctggccaagggctgccagctgcctttcatcgagaaccctgtgagccaggtggagatcctgcagaacaagcctctgagcgtgggcagacagaagaacagcagcgacatcgtgcagatcgcccctcagagtctcgttctgaagcttcggcctggcggcgagcagaccctgcaggtgcaggtgagacagaccgaggactaccctgtggacctgtactacctgatggacttatccgccagcatggacgacgacctgaacaccatcaaggagctgggcagcagacttgcaaaggagatgagcaagctgaccagcaacttcagactgggcttcggcagcttcgtggagaagccagttagtcctttcatgaagacgaccccagaggagatcaccaacccttgcagcagcatcccttacttctgcctgcctaccttcggcttcaagcacatcctgcctctgaccgacgacgccgagagattcaacgagatcgtgagaaagcagaagatcagcgccaacatcgatacacctgagggaggtttcgacgccatcatgcaggccgccgtgtgcaaggagaagatcggctggcgaaacgacagcctgcaccttctagtgttcgtgagcgacgcagacagccacttcggcatggactctaagctagccggcatcgtgatccctaacgacggcctgtgccacctggacaatcgtaacgagtacagcatgagcaccgtgctggagtaccctaccatcggccagctgatcgacaagcttgtgcagaataacgtgctgctgatcttcgccgtgacccaggagcaggtccacctgtacgagaactacgccaagctgatccctggcgccaccgtgggcctgctgcagaaggacagcggcaacatcttacagctgattatatcagcctacgaggagctgagaagcgaggtggagctggaggtgctgggcgacaccgagggcctgaacctgagcttcaccgccctgtgcagcaacggcatcctgttccctcaccagaagaagtgttcccacatgaaggtcggtgatacagcatcattcaacgtgagcgtgagcattaccaattgcgagaagagaagcagaaagttaataattaagcctgtcggactgggcgatactcttgaaatcctagtgagcgccgagtgcgactgtgattgccagagagaggtggaagccaattcttccaagtgccaccacggcaacggatccttccagtgcggcgtgtgcgcctgcaaccctggccacatgggccctcgatgcgagtgtggagaggacatggtttctaccgacagctgcaaggaaagcccaggccatcctagctgcagcggcagaggcgactgctactgcggccagtgcgtgtgccatctgagtccttacggcagcatctacggcccttactgtcagtgcgataacttctcgtgcctgagacacaagggtttgctgtgcggtgacaacggagattgtgactgcggagagtgcgtgtgtagagacggctggaccggcgagtactgcaactgcaccaccagcagggacgcctgcgccagcgaggacggcgtgttgtgttctggacgtggtgattgtgtgtgtggcaagtgcgtctgcagaaacccgggagccagcggccctacctgtgagaggtgcccaacttgtggcgatccttgcaattcacgtaggagctgcatcgagtgctacttgagcgctgacggccaggcccaggaggagtgcgaggataagtgcaaggccaccggagcaactatctctgaggaagaattcagcaaggacaccagcgtgccttgcagtttgcagggagagaacgagtgcctgatcaccttcctcatcaccgccgacaacgagggcaagaccatcatccacaatattagcgagaaggactgccctaagcctcctaacatccctatgatcatgctgggagtgagcttggctatcctgcttatcggcgtggtcttgctgtgtatctggaagctcctcgtcagtttccacgacagaaaggaggtggccaagttcgaggctgaaagatctaaggccaagtggcagaccggaaccaatcctctgtacagaggcagcaccagcaccttcaagaacgtgacctacaagcaccgggagaagcacaaggtcggcctgagtagcgacggcggcaagcctattccaaacccactgctcggtctggactcaacctgataataggctggagcctcggtggcctagcttcttgccccttgggcctccccccagcccctcctccccttcctgcacccgtaccccccaaacaccattgtcacactccagtggtctttgaataaagtctgagtgggcggc

SEQ ID NO: 174 - RNA, 2600 nt, unidentified
  source 1..2600: mol_type = unassigned RNA
  modified_base 6: mod_base = OTHER; note = N1-methylpseudouracil
  modified_base 24: mod_base = OTHER; note = N1-methylpseudouracil
  modified_base 34: mod_base = OTHER; note = N1-methylpseudouracil
  modified_base 36: mod_base = OTHER; note = N1-methylpseudouracil
  modified_base 58: mod_base = OTHER; note = N1-methylpseudouracil
  modified_base 64: mod_base = OTHER; note = N1-methylpseudouracil
  modified_base 70: mod_base = OTHER; note = N1-methylpseudouracil
  modified_base 73: mod_base = OTHER; note = N1-methylpseudouracil
  modified_base 75: mod_base = OTHER; note = N1-methylpseudouracil
  modified_base 79: mod_base = OTHER; note = N1-methylpseudouracil
  modified_base 81: mod_base = OTHER; note = N1-methylpseudouracil
  modified_base 82: mod_base = OTHER; note = N1-methylpseudouracil
  modified_base 85: mod_base = OTHER; note = N1-methylpseudouracil
  modified_base 88: mod_base = OTHER; note = N1-methylpseudouracil
  modified_base 91: mod_base = OTHER; note = N1-methylpseudouracil
  modified_base 93: mod_base = OTHER; note = N1-methylpseudouracil
  modified_base 94: mod_base = OTHER; note = N1-methylpseudouracil
  modified_base 112: mod_base = OTHER; note = N1-methylpseudouracil
  modified_base 123: mod_base = OTHER; note = N1-methylpseudouracil
  modified_base 129: mod_base = OTHER; note = N1-methylpseudouracil
  modified_base 137: mod_base = OTHER; note = N1-methylpseudouracil
  modified_base 147: mod_base = OTHER; note = N1-methylpseudouracil
  modified_base 156: mod_base = OTHER; note = N1-methylpseudouracil
  modified_base 160: mod_base = OTHER; note = N1-methylpseudouracil
  modified_base 163: mod_base = OTHER; note = N1-methylpseudouracil
  modified_base 173: mod_base = OTHER; note = N1-methylpseudouracil
  modified_base 177: mod_base = OTHER; note = N1-methylpseudouracil
  modified_base 179: mod_base = OTHER; note = N1-methylpseudouracil
  modified_base 183: mod_base = OTHER; note = N1-methylpseudouracil
  modified_base 186: mod_base = OTHER; note = N1-methylpseudouracil
  modified_base 201: mod_base = OTHER; note = N1-methylpseudouracil
  modified_base 202: mod_base = OTHER; note = N1-methylpseudouracil
  modified_base 211: mod_base = OTHER; note = N1-methylpseudouracil
  modified_base 215: mod_base = OTHER; note = N1-methylpseudouracil
  modified_base 231: mod_base = OTHER; note = N1-methylpseudouracil
  modified_base 242: mod_base = OTHER; note = N1-methylpseudouracil
  modified_base 250: mod_base = OTHER; note = N1-methylpseudouracil
  modified_base 253: mod_base = OTHER; note = N1-methylpseudouracil
  modified_base 264: mod_base = OTHER; note = N1-methylpseudouracil
  modified_base 271: mod_base = OTHER; note = N1-methylpseudouracil
  modified_base 275: mod_base = OTHER; note = N1-methylpseudouracil
  modified_base 276: mod_base = OTHER; note = N1-methylpseudouracil
  modified_base 277: mod_base = OTHER; note = N1-methylpseudouracil
  modified_base 280: mod_base = OTHER; note = N1-methylpseudouracil
  modified_base 290: mod_base = OTHER; note = N1-methylpseudouracil
  modified_base 292: mod_base = OTHER; note = N1-methylpseudouracil
  modified_base 301: mod_base = OTHER; note = N1-methylpseudouracil
  modified_base 307: mod_base = OTHER; note = N1-methylpseudouracil
  modified_base 310: mod_base = OTHER; note = N1-methylpseudouracil
  modified_base 323: mod_base = OTHER; note = N1-methylpseudouracil
  modified_base 325: mod_base = OTHER; note = N1-methylpseudouracil
  modified_base 331: mod_base = OTHER; note = N1-methylpseudouracil
  modified_base 358: mod_base = OTHER; note = N1-methylpseudouracil
  modified_base 361: mod_base = OTHER; note = N1-methylpseudouracil
  modified_base 367: mod_base = OTHER; note = N1-methylpseudouracil
  modified_base 374: mod_base = OTHER; note = N1-methylpseudouracil
  modified_base 378: mod_base = OTHER; note = N1-methylpseudouracil
  modified_base 382: mod_base = OTHER; note = N1-methylpseudouracil
  modified_base 383: mod_base = OTHER; note = N1-methylpseudouracil
  modified_base 385: mod_base = OTHER; note = N1-methylpseudouracil
  modified_base 388: mod_base = OTHER; note = N1-methylpseudouracil
  modified_base 393: mod_base = OTHER; note = N1-methylpseudouracil
  modified_base 394: mod_base = OTHER; note = N1-methylpseudouracil
  modified_base 401: mod_base = OTHER; note = N1-methylpseudouracil
  modified_base 418: mod_base = OTHER; note = N1-methylpseudouracil
  modified_base 424: mod_base = OTHER; note = N1-methylpseudouracil
  modified_base 430: mod_base = OTHER; note = N1-methylpseudouracil
  modified_base 447: mod_base = OTHER; note = N1-methylpseudouracil
  modified_base 452: mod_base = OTHER; note = N1-methylpseudouracil
  modified_base 454: mod_base = OTHER; note = N1-methylpseudouracil
  modified_base 460: mod_base = OTHER; note = N1-methylpseudouracil
  modified_base 462: mod_base = OTHER; note = N1-methylpseudouracil
  modified_base 465: mod_base = OTHER; note = N1-methylpseudouracil
  modified_base 469: mod_base = OTHER; note = N1-methylpseudouracil
  modified_base 472: mod_base = OTHER; note = N1-methylpseudouracil
  modified_base 476: mod_base = OTHER; note = N1-methylpseudouracil
  modified_base 478: mod_base = OTHER; note = N1-methylpseudouracil
  modified_base 490: mod_base = OTHER; note = N1-methylpseudouracil
  modified_base 502: mod_base = OTHER; note = N1-methylpseudouracil
  modified_base 511: mod_base = OTHER; note = N1-methylpseudouracil
  modified_base 520: mod_base = OTHER; note = N1-methylpseudouracil
  modified_base 524: mod_base = OTHER; note = N1-methylpseudouracil
  modified_base 532: mod_base = OTHER; note = N1-methylpseudouracil
  modified_base 536: mod_base = OTHER; note = N1-methylpseudouracil
  modified_base 544: mod_base = OTHER; note = N1-methylpseudouracil
  modified_base 553: mod_base = OTHER; note = N1-methylpseudouracil
  modified_base 564: mod_base = OTHER; note = N1-methylpseudouracil
  modified_base 565: mod_base = OTHER; note = N1-methylpseudouracil
  modified_base 571: mod_base = OTHER; note = N1-methylpseudouracil
  modified_base 576: mod_base = OTHER; note = N1-methylpseudouracil
  modified_base 577: mod_base = OTHER; note = N1-methylpseudouracil
  modified_base 585: mod_base = OTHER; note = N1-methylpseudouracil
  modified_base 586: mod_base = OTHER; note = N1-methylpseudouracil
  modified_base 589: mod_base = OTHER; note = N1-methylpseudouracil
  modified_base 599: mod_base = OTHER; note = N1-methylpseudouracil
  modified_base 601: mod_base = OTHER; note = N1-methylpseudouracil
  modified_base 602: mod_base = OTHER; note = N1-methylpseudouracil
  modified_base 603: mod_base = OTHER; note = N1-methylpseudouracil
  modified_base 608: mod_base = OTHER; note = N1-methylpseudouracil
  modified_base 609: mod_base = OTHER; note = N1-methylpseudouracil
  modified_base 610: mod_base = OTHER; note = N1-methylpseudouracil
  modified_base 613: mod_base = OTHER; note = N1-methylpseudouracil
  modified_base 626: mod_base = OTHER; note = N1-methylpseudouracil
  modified_base 634: mod_base = OTHER; note = N1-methylpseudouracil
  modified_base 644: mod_base = OTHER; note = N1-methylpseudouracil
  modified_base 645: mod_base = OTHER; note = N1-methylpseudouracil
  modified_base 655: mod_base = OTHER; note = N1-methylpseudouracil
  modified_base 659: mod_base = OTHER; note = N1-methylpseudouracil
  modified_base 660: mod_base = OTHER; note = N1-methylpseudouracil
  modified_base 663: mod_base = OTHER; note = N1-methylpseudouracil
  modified_base 664: mod_base = OTHER; note = N1-methylpseudouracil
  modified_base 666: mod_base = OTHER; note = N1-methylpseudouracil
  modified_base 670: mod_base = OTHER; note = N1-methylpseudouracil
  modified_base 674: mod_base = OTHER; note = N1-methylpseudouracil
  modified_base 678: mod_base = OTHER; note = N1-methylpseudouracil
  modified_base 679: mod_base = OTHER; note = N1-methylpseudouracil
  modified_base 684: mod_base = OTHER; note = N1-methylpseudouracil
  modified_base 685: mod_base = OTHER; note = N1-methylpseudouracil
  modified_base 694: mod_base = OTHER; note = N1-methylpseudouracil
  modified_base 697: mod_base = OTHER; note = N1-methylpseudouracil
  modified_base 701: mod_base = OTHER; note = N1-methylpseudouracil
  modified_base 703: mod_base = OTHER; note = N1-methylpseudouracil
  modified_base 723: mod_base = OTHER; note = N1-methylpseudouracil
  modified_base 724: mod_base = OTHER; note = N1-methylpseudouracil
  modified_base 733: mod_base = OTHER; note = N1-methylpseudouracil
  modified_base 736: mod_base = OTHER; note = N1-methylpseudouracil
  modified_base 751: mod_base = OTHER; note = N1-methylpseudouracil
  modified_base 763: mod_base = OTHER; note = N1-methylpseudouracil
  modified_base 764: mod_base = OTHER; note = N1-methylpseudouracil
  modified_base 783: mod_base = OTHER; note = N1-methylpseudouracil
  modified_base 784: mod_base = OTHER; note = N1-methylpseudouracil
  modified_base 793: mod_base = OTHER; note = N1-methylpseudouracil
  modified_base 796: mod_base = OTHER; note = N1-methylpseudouracil
  modified_base 808: mod_base = OTHER; note = N1-methylpseudouracil
  modified_base 810: mod_base = OTHER; note = N1-methylpseudouracil
  modified_base 823: mod_base = OTHER; note = N1-methylpseudouracil
  modified_base 828: mod_base = OTHER; note = N1-methylpseudouracil
  modified_base 839: mod_base = OTHER; note = N1-methylpseudouracil
  modified_base 844: mod_base = OTHER; note = N1-methylpseudouracil
  modified_base 848: mod_base = OTHER; note = N1-methylpseudouracil
  modified_base 849: mod_base = OTHER; note = N1-methylpseudouracil
  modified_base 850: mod_base = OTHER; note = N1-methylpseudouracil
  modified_base 852: mod_base = OTHER; note = N1-methylpseudouracil
  modified_base 853: mod_base = OTHER; note = N1-methylpseudouracil
  modified_base 856: mod_base = OTHER; note = N1-methylpseudouracil
  modified_base 858: mod_base = OTHER; note = N1-methylpseudouracil
  modified_base 859: mod_base = OTHER; note = N1-methylpseudouracil
  modified_base 862: mod_base = OTHER; note = N1-methylpseudouracil
  modified_base 866: mod_base = OTHER; note = N1-methylpseudouracil
  modified_base 882: mod_base = OTHER; note = N1-methylpseudouracil
  modified_base 883: mod_base = OTHER; note = N1-methylpseudouracil
  modified_base 889: mod_base = OTHER; note = N1-methylpseudouracil
  modified_base 894: mod_base = OTHER; note = N1-methylpseudouracil
  modified_base 901: mod_base = OTHER; note = N1-methylpseudouracil
  modified_base 902: mod_base = OTHER; note = N1-methylpseudouracil
  modified_base 910: mod_base = OTHER; note = N1-methylpseudouracil
  modified_base 913: mod_base = OTHER; note = N1-methylpseudouracil
  modified_base 916: mod_base = OTHER; note = N1-methylpseudouracil
  modified_base 920: mod_base = OTHER; note = N1-methylpseudouracil
  modified_base 931: mod_base = OTHER; note = N1-methylpseudouracil
  modified_base 933: mod_base = OTHER; note = N1-methylpseudouracil
  modified_base 940: mod_base = OTHER; note = N1-methylpseudouracil
  modified_base 957: mod_base = OTHER; note = N1-methylpseudouracil
  modified_base 964: mod_base = OTHER; note = N1-methylpseudouracil
  modified_base 973: mod_base = OTHER; note = N1-methylpseudouracil
  modified_base 976: mod_base = OTHER; note = N1-methylpseudouracil
  modified_base 981: mod_base = OTHER; note = N1-methylpseudouracil
  modified_base 986: mod_base = OTHER; note = N1-methylpseudouracil
  modified_base 991: mod_base = OTHER; note = N1-methylpseudouracil
  modified_base 1000: mod_base = OTHER; note = N1-methylpseudouracil
  modified_base 1003: mod_base = OTHER; note = N1-methylpseudouracil
  modified_base 1012: mod_base = OTHER; note = N1-methylpseudouracil
  modified_base 1015: mod_base = OTHER; note = N1-methylpseudouracil
  modified_base 1022: mod_base = OTHER; note = N1-methylpseudouracil
  modified_base 1027: mod_base = OTHER; note = N1-methylpseudouracil
  modified_base 1030: mod_base = OTHER; note = N1-methylpseudouracil
  modified_base 1033: mod_base = OTHER; note = N1-methylpseudouracil
  modified_base 1036: mod_base = OTHER; note = N1-methylpseudouracil
  modified_base 1038: mod_base = OTHER; note = N1-methylpseudouracil
  modified_base 1039: mod_base = OTHER; note = N1-methylpseudouracil
  modified_base 1045: mod_base = OTHER; note = N1-methylpseudouracil
  modified_base 1060: mod_base = OTHER; note = N1-methylpseudouracil
  modified_base 1061: mod_base = OTHER; note = N1-methylpseudouracil
  modified_base 1066: mod_base = OTHER; note = N1-methylpseudouracil
  modified_base 1068: mod_base = OTHER; note = N1-methylpseudouracil
  modified_base 1077: mod_base = OTHER; note = N1-methylpseudouracil
  modified_base 1087: mod_base = OTHER; note = N1-methylpseudouracil
  modified_base 1090: mod_base = OTHER; note = N1-methylpseudouracil
  modified_base 1094: mod_base = OTHER; note = N1-methylpseudouracil
  modified_base 1105: mod_base = OTHER; note = N1-methylpseudouracil
  modified_base 1111: mod_base = OTHER; note = N1-methylpseudouracil
  modified_base 1114: mod_base = OTHER; note = N1-methylpseudouracil
  modified_base 1135: mod_base = OTHER; note = N1-methylpseudouracil
  modified_base 1138: mod_base = OTHER; note = N1-methylpseudouracil
  modified_base 1144: mod_base = OTHER; note = N1-methylpseudouracil
  modified_base 1147: mod_base = OTHER; note = N1-methylpseudouracil
  modified_base 1150: mod_base = OTHER; note = N1-methylpseudouracil
  modified_base 1152: mod_base = OTHER; note = N1-methylpseudouracil
  modified_base 1154: mod_base = OTHER; note = N1-methylpseudouracil
  modified_base 1157: mod_base = OTHER; note = N1-methylpseudouracil
  modified_base 1158: mod_base = OTHER; note = N1-methylpseudouracil
  modified_base 1168: mod_base = OTHER; note = N1-methylpseudouracil
  modified_base 1180: mod_base = OTHER; note = N1-methylpseudouracil
  modified_base 1186: mod_base = OTHER; note = N1-methylpseudouracil
  modified_base 1192: mod_base = OTHER; note = N1-methylpseudouracil
  modified_base 1195: mod_base = OTHER; note = N1-methylpseudouracil
  modified_base 1213: mod_base = OTHER; note = N1-methylpseudouracil
  modified_base 1219: mod_base = OTHER; note = N1-methylpseudouracil
  modified_base 1224: mod_base = OTHER; note = N1-methylpseudouracil
  modified_base 1225: mod_base = OTHER; note = N1-methylpseudouracil
  modified_base 1234: mod_base = OTHER; note = N1-methylpseudouracil
  modified_base 1236: mod_base = OTHER; note = N1-methylpseudouracil
  modified_base 1249: mod_base = OTHER; note = N1-methylpseudouracil
  modified_base 1252: mod_base = OTHER; note = N1-methylpseudouracil
  modified_base 1254: mod_base = OTHER; note = N1-methylpseudouracil
  modified_base 1255: mod_base = OTHER; note = N1-methylpseudouracil
  modified_base 1259: mod_base = OTHER; note = N1-methylpseudouracil
  modified_base 1272: mod_base = OTHER; note = N1-methylpseudouracil
  modified_base 1274: mod_base = OTHER; note = N1-methylpseudouracil
  modified_base 1277: mod_base = OTHER; note = N1-methylpseudouracil
  modified_base 1282: mod_base = OTHER; note = N1-methylpseudouracil
  modified_base 1288: mod_base = OTHER; note = N1-methylpseudouracil
  modified_base 1289: mod_base = OTHER; note = N1-methylpseudouracil
  modified_base 1295: mod_base = OTHER; note = N1-methylpseudouracil
  modified_base 1305: mod_base = OTHER; note = N1-methylpseudouracil
  modified_base 1306: mod_base = OTHER; note = N1-methylpseudouracil
  modified_base 1312: mod_base = OTHER; note = N1-methylpseudouracil
  modified_base 1318: mod_base = OTHER; note = N1-methylpseudouracil
  modified_base 1324: mod_base = OTHER; note = N1-methylpseudouracil
  modified_base 1332: mod_base = OTHER; note = N1-methylpseudouracil
  modified_base 1354: mod_base = OTHER; note = N1-methylpseudouracil
  modified_base 1355: mod_base = OTHER; note = N1-methylpseudouracil
  modified_base 1357: mod_base = OTHER; note = N1-methylpseudouracil
  modified_base 1360: mod_base = OTHER; note = N1-methylpseudouracil
  modified_base 1369: mod_base = OTHER; note = N1-methylpseudouracil
  modified_base 1370: mod_base = OTHER; note = N1-methylpseudouracil
  modified_base 1373: mod_base = OTHER; note = N1-methylpseudouracil
  modified_base 1375: mod_base = OTHER; note = N1-methylpseudouracil
  modified_base 1387: mod_base = OTHER; note = N1-methylpseudouracil
  modified_base 1393: mod_base = OTHER; note = N1-methylpseudouracil
  modified_base 1396: mod_base = OTHER; note = N1-methylpseudouracil
  modified_base 1399: mod_base = OTHER; note = N1-methylpseudouracil
  modified_base 1410: mod_base = OTHER; note = N1-methylpseudouracil
  modified_base 1416: mod_base = OTHER; note = N1-methylpseudouracil
  modified_base 1421: mod_base = OTHER; note = N1-methylpseudouracil
  modified_base 1422: mod_base = OTHER; note = N1-methylpseudouracil
  modified_base 1424: mod_base = OTHER; note = N1-methylpseudouracil
  modified_base 1435: mod_base = OTHER; note = N1-methylpseudouracil
  modified_base 1445: mod_base = OTHER; note = N1-methylpseudouracil
  modified_base 1446: mod_base = OTHER; note = N1-methylpseudouracil
  modified_base 1449: mod_base = OTHER; note = N1-methylpseudouracil
  modified_base 1451: mod_base = OTHER; note = N1-methylpseudouracil
  modified_base 1455: mod_base = OTHER; note = N1-methylpseudouracil
  modified_base 1473: mod_base = OTHER; note = N1-methylpseudouracil
  modified_base 1475: mod_base = OTHER; note = N1-methylpseudouracil
  modified_base 1476: mod_base = OTHER; note = N1-methylpseudouracil
  modified_base 1477: mod_base = OTHER; note = N1-methylpseudouracil
  modified_base 1482: mod_base = OTHER; note = N1-methylpseudouracil
  modified_base 1489: mod_base = OTHER; note = N1-methylpseudouracil
  modified_base 1491: mod_base = OTHER; note = N1-methylpseudouracil
  modified_base 1497: mod_base = OTHER; note = N1-methylpseudouracil
  modified_base 1505: mod_base = OTHER; note = N1-methylpseudouracil
  modified_base 1513: mod_base = OTHER; note = N1-methylpseudouracil
  modified_base 1524: mod_base = OTHER; note = N1-methylpseudouracil
  modified_base 1530: mod_base = OTHER; note = N1-methylpseudouracil
  modified_base 1543: mod_base = OTHER; note = N1-methylpseudouracil
  modified_base 1546: mod_base = OTHER; note = N1-methylpseudouracil
  modified_base 1548: mod_base = OTHER; note = N1-methylpseudouracil
  modified_base 1560: mod_base = OTHER; note = N1-methylpseudouracil
  modified_base 1562: mod_base = OTHER; note = N1-methylpseudouracil
  modified_base 1580: mod_base = OTHER; note = N1-methylpseudouracil
  modified_base 1583: mod_base = OTHER; note = N1-methylpseudouracil
  modified_base 1584: mod_base = OTHER; note = N1-methylpseudouracil
  modified_base 1586: mod_base = OTHER; note = N1-methylpseudouracil
  modified_base 1587: mod_base = OTHER; note = N1-methylpseudouracil
  modified_base 1590: mod_base = OTHER; note = N1-methylpseudouracil
  modified_base 1605: mod_base = OTHER; note = N1-methylpseudouracil
  modified_base 1608: mod_base = OTHER; note = N1-methylpseudouracil
  modified_base 1611: mod_base = OTHER; note = N1-methylpseudouracil
  modified_base 1620: mod_base = OTHER; note = N1-methylpseudouracil
  modified_base 1624: mod_base = OTHER; note = N1-methylpseudouracil
  modified_base 1626: mod_base = OTHER; note = N1-methylpseudouracil
  modified_base 1631: mod_base = OTHER; note = N1-methylpseudouracil
  modified_base 1633: mod_base = OTHER; note = N1-methylpseudouracil
  modified_base 1635: mod_base = OTHER; note = N1-methylpseudouracil
  modified_base 1640: mod_base = OTHER; note = N1-methylpseudouracil
  modified_base 1641: mod_base = OTHER; note = N1-methylpseudouracil
  modified_base 1651: mod_base = OTHER; note = N1-methylpseudouracil
  modified_base 1653: mod_base = OTHER; note = N1-methylpseudouracil
  modified_base 1661: mod_base = OTHER; note = N1-methylpseudouracil
  modified_base 1662: mod_base = OTHER; note = N1-methylpseudouracil
  modified_base 1665: mod_base = OTHER; note = N1-methylpseudouracil
  modified_base 1671: mod_base = OTHER; note = N1-methylpseudouracil
  modified_base 1676: mod_base = OTHER; note = N1-methylpseudouracil
  modified_base 1680: mod_base = OTHER; note = N1-methylpseudouracil
  modified_base 1681: mod_base = OTHER; note = N1-methylpseudouracil
  modified_base 1683: mod_base = OTHER; note = N1-methylpseudouracil
  modified_base 1686: mod_base = OTHER; note = N1-methylpseudouracil
  modified_base 1690: mod_base = OTHER; note = N1-methylpseudouracil
  modified_base 1705: mod_base = OTHER; note = N1-methylpseudouracil
  modified_base 1708: mod_base = OTHER; note = N1-methylpseudouracil
  modified_base 1710: mod_base = OTHER; note = N1-methylpseudouracil
  modified_base 1728: mod_base = OTHER; note = N1-methylpseudouracil
  modified_base 1730: mod_base = OTHER; note = N1-methylpseudouracil
  modified_base 1733: mod_base = OTHER; note = N1-methylpseudouracil
  modified_base 1734: mod_base = OTHER; note = N1-methylpseudouracil
  modified_base 1736: mod_base = OTHER; note = N1-methylpseudouracil
  modified_base 1739: mod_base = OTHER; note = N1-methylpseudouracil
  modified_base 1743: mod_base = OTHER; note = N1-methylpseudouracil
  modified_base 1745: mod_base = OTHER; note = N1-methylpseudouracil
  modified_base 1747: mod_base = OTHER; note = N1-methylpseudouracil
  modified_base 1749: mod_base = OTHER; note = N1-methylpseudouracil
  modified_base 1761: mod_base = OTHER; note = N1-methylpseudouracil
  modified_base 1773: mod_base = OTHER; note = N1-methylpseudouracil
  modified_base 1776: mod_base = OTHER; note = N1-methylpseudouracil
  modified_base 1782: mod_base = OTHER; note = N1-methylpseudouracil
  modified_base 1799: mod_base = OTHER; note = N1-methylpseudouracil
  modified_base 1803: mod_base = OTHER; note = N1-methylpseudouracil
  modified_base 1805: mod_base = OTHER; note = N1-methylpseudouracil
  modified_base 1820: mod_base = OTHER; note = N1-methylpseudouracil
  modified_base 1822: mod_base = OTHER; note = N1-methylpseudouracil
  modified_base 1825: mod_base = OTHER; note = N1-methylpseudouracil
  modified_base 1827: mod_base = OTHER; note = N1-methylpseudouracil
  modified_base 1829: mod_base = OTHER; note = N1-methylpseudouracil
  modified_base 1830: mod_base = OTHER; note = N1-methylpseudouracil
  modified_base 1841: mod_base = OTHER; note = N1-methylpseudouracil
  modified_base 1844: mod_base = OTHER; note = N1-methylpseudouracil
  modified_base 1845: mod_base = OTHER; note = N1-methylpseudouracil
  modified_base 1849: mod_base = OTHER; note = N1-methylpseudouracil
  modified_base 1850: mod_base = OTHER; note = N1-methylpseudouracil
  modified_base 1851: mod_base = OTHER; note = N1-methylpseudouracil
  modified_base 1853: mod_base = OTHER; note = N1-methylpseudouracil
  modified_base 1860: mod_base = OTHER; note = N1-methylpseudouracil
  modified_base 1862: mod_base = OTHER; note = N1-methylpseudouracil
  modified_base 1864: mod_base = OTHER; note = N1-methylpseudouracil
  modified_base 1865: mod_base = OTHER; note = N1-methylpseudouracil
  modified_base 1866: mod_base = OTHER; note = N1-methylpseudouracil
  modified_base 1871: mod_base = OTHER; note = N1-methylpseudouracil
  modified_base 1892: mod_base = OTHER; note = N1-methylpseudouracil
  modified_base 1896: mod_base = OTHER; note = N1-methylpseudouracil
  modified_base 1905: mod_base = OTHER; note = N1-methylpseudouracil
  modified_base 1914: mod_base = OTHER; note = N1-methylpseudouracil
  modified_base 1916: mod_base = OTHER; note = N1-methylpseudouracil
  modified_base 1922: mod_base = OTHER; note = N1-methylpseudouracil
  modified_base 1926: mod_base = OTHER; note = N1-methylpseudouracil
  modified_base 1928: mod_base = OTHER; note = N1-methylpseudouracil
  modified_base 1943: mod_base = OTHER; note = N1-methylpseudouracil
  modified_base 1944: mod_base = OTHER; note = N1-methylpseudouracil
  modified_base 1948: mod_base = OTHER; note = N1-methylpseudouracil
  modified_base 1953: mod_base = OTHER; note = N1-methylpseudouracil
  modified_base 1956: mod_base = OTHER; note = N1-methylpseudouracil
  modified_base 1958: mod_base = OTHER; note = N1-methylpseudouracil
  modified_base 1960: mod_base = OTHER; note = N1-methylpseudouracil
  modified_base 1962: mod_base = OTHER; note = N1-methylpseudouracil
  modified_base 1989: mod_base = OTHER; note = N1-methylpseudouracil
  modified_base 2001: mod_base = OTHER; note = N1-methylpseudouracil
  modified_base 2011: mod_base = OTHER; note = N1-methylpseudouracil
  modified_base 2018: mod_base = OTHER; note = N1-methylpseudouracil
  modified_base 2021: mod_base = OTHER; note = N1-methylpseudouracil
  modified_base 2023: mod_base = OTHER; note = N1-methylpseudouracil
  modified_base 2024: mod_base = OTHER; note = N1-methylpseudouracil
  modified_base 2025: mod_base = OTHER; note = N1-methylpseudouracil
  modified_base 2037: mod_base = OTHER; note = N1-methylpseudouracil
  modified_base 2038: mod_base = OTHER; note = N1-methylpseudouracil
  modified_base 2056: mod_base = OTHER; note = N1-methylpseudouracil
  modified_base 2057: mod_base = OTHER; note = N1-methylpseudouracil
  modified_base 2061: mod_base = OTHER; note = N1-methylpseudouracil
  modified_base 2063: mod_base = OTHER; note = N1-methylpseudouracil
  modified_base 2064: mod_base = OTHER; note = N1-methylpseudouracil
  modified_base 2068: mod_base = OTHER; note = N1-methylpseudouracil
  modified_base 2075: mod_base = OTHER; note = N1-methylpseudouracil
  modified_base 2085: mod_base = OTHER; note = N1-methylpseudouracil
  modified_base 2089: mod_base = OTHER; note = N1-methylpseudouracil
  modified_base 2092: mod_base = OTHER; note = N1-methylpseudouracil
  modified_base 2097: mod_base = OTHER; note = N1-methylpseudouracil
  modified_base 2098: mod_base = OTHER; note = N1-methylpseudouracil
  modified_base 2101: mod_base = OTHER; note = N1-methylpseudouracil
  modified_base 2104: mod_base = OTHER; note = N1-methylpseudouracil
  modified_base 2131: mod_base = OTHER; note = N1-methylpseudouracil
  modified_base 2134: mod_base = OTHER; note = N1-methylpseudouracil
  modified_base 2143: mod_base = OTHER; note = N1-methylpseudouracil
  modified_base 2157: mod_base = OTHER; note = N1-methylpseudouracil
  modified_base 2162: mod_base = OTHER; note = N1-methylpseudouracil
  modified_base 2168: mod_base = OTHER; note = N1-methylpseudouracil
  modified_base 2171: mod_base = OTHER; note = N1-methylpseudouracil
  modified_base 2176: mod_base = OTHER; note = N1-methylpseudouracil
  modified_base 2180: mod_base = OTHER; note = N1-methylpseudouracil
  modified_base 2182: mod_base = OTHER; note = N1-methylpseudouracil
  modified_base 2185: mod_base = OTHER; note = N1-methylpseudouracil
  modified_base 2188: mod_base = OTHER; note = N1-methylpseudouracil
  modified_base 2191: mod_base = OTHER; note = N1-methylpseudouracil
  modified_base 2197: mod_base = OTHER; note = N1-methylpseudouracil
  modified_base 2203: mod_base = OTHER; note = N1-methylpseudouracil
  modified_base 2209: mod_base = OTHER; note = N1-methylpseudouracil
  modified_base 2212: mod_base = OTHER; note = N1-methylpseudouracil
  modified_base 2215: mod_base = OTHER; note = N1-methylpseudouracil
  modified_base 2216: mod_base = OTHER; note = N1-methylpseudouracil
  modified_base 2218: mod_base = OTHER; note = N1-methylpseudouracil
  modified_base 2224: mod_base = OTHER; note = N1-methylpseudouracil
  modified_base 2227: mod_base = OTHER; note = N1-methylpseudouracil
  modified_base 2228: mod_base = OTHER; note = N1-methylpseudouracil
  modified_base 2230: mod_base = OTHER; note = N1-methylpseudouracil
  modified_base 2233: mod_base = OTHER; note = N1-methylpseudouracil
  modified_base 2235: mod_base = OTHER; note = N1-methylpseudouracil
  modified_base 2239: mod_base = OTHER; note = N1-methylpseudouracil
  modified_base 2240: mod_base = OTHER; note = N1-methylpseudouracil
  modified_base 2241: mod_base = OTHER; note = N1-methylpseudouracil
  modified_base 2247: mod_base = OTHER; note = N1-methylpseudouracil
  modified_base 2248: mod_base = OTHER; note = N1-methylpseudouracil
  modified_base 2250: mod_base = OTHER; note = N1-methylpseudouracil
  modified_base 2251: mod_base = OTHER; note = N1-methylpseudouracil
  modified_base 2254: mod_base = OTHER; note = N1-methylpseudouracil
  modified_base 2258: mod_base = OTHER; note = N1-methylpseudouracil
  modified_base 2259: mod_base = OTHER; note = N1-methylpseudouracil
  modified_base 2260: mod_base = OTHER; note = N1-methylpseudouracil
  modified_base 2278: mod_base = OTHER; note = N1-methylpseudouracil
  modified_base 2286: mod_base = OTHER; note = N1-methylpseudouracil
  modified_base 2287: mod_base = OTHER; note = N1-methylpseudouracil
  modified_base 2301: mod_base = OTHER; note = N1-methylpseudouracil
  modified_base 2313: mod_base = OTHER; note = N1-methylpseudouracil
  modified_base 2335: mod_base = OTHER; note = N1-methylpseudouracil
  modified_base 2337: mod_base = OTHER; note = N1-methylpseudouracil
  modified_base 2358: mod_base = OTHER; note = N1-methylpseudouracil
  modified_base 2359: mod_base = OTHER; note = N1-methylpseudouracil
  modified_base 2368: mod_base = OTHER; note = N1-methylpseudouracil
  modified_base 2373: mod_base = OTHER; note = N1-methylpseudouracil
  modified_base 2404: mod_base = OTHER; note = N1-methylpseudouracil
  modified_base 2406: mod_base = OTHER; note = N1-methylpseudouracil
  modified_base 2409: mod_base = OTHER; note = N1-methylpseudouracil
  modified_base 2411: mod_base = OTHER; note = N1-methylpseudouracil
  modified_base 2426: mod_base = OTHER; note = N1-methylpseudouracil
  modified_base 2428: mod_base = OTHER; note = N1-methylpseudouracil
  modified_base 2435: mod_base = OTHER; note = N1-methylpseudouracil
  modified_base 2440: mod_base = OTHER; note = N1-methylpseudouracil
  modified_base 2443: mod_base = OTHER; note = N1-methylpseudouracil
  modified_base 2449: mod_base = OTHER; note = N1-methylpseudouracil
  modified_base 2453: mod_base = OTHER; note = N1-methylpseudouracil
  modified_base 2456: mod_base = OTHER; note = N1-methylpseudouracil
  modified_base 2460: mod_base = OTHER; note = N1-methylpseudouracil
  modified_base 2463: mod_base = OTHER; note = N1-methylpseudouracil
  modified_base 2466: mod_base = OTHER; note = N1-methylpseudouracil
  modified_base 2471: mod_base = OTHER; note = N1-methylpseudouracil
  modified_base 2478: mod_base = OTHER; note = N1-methylpseudouracil
  modified_base 2482: mod_base = OTHER; note = N1-methylpseudouracil
  modified_base 2487: mod_base = OTHER; note = N1-methylpseudouracil
  modified_base 2491: mod_base = OTHER; note = N1-methylpseudouracil
  modified_base 2492: mod_base = OTHER; note = N1-methylpseudouracil
  modified_base 2494: mod_base = OTHER; note = N1-methylpseudouracil
  modified_base 2495: mod_base = OTHER; note = N1-methylpseudouracil
  modified_base 2501: mod_base = OTHER; note = N1-methylpseudouracil
  modified_base 2502: mod_base = OTHER; note = N1-methylpseudouracil
  modified_base 2508: mod_base = OTHER; note = N1-methylpseudouracil
  modified_base 2521: mod_base = OTHER; note = N1-methylpseudouracil
  modified_base 2524: mod_base = OTHER; note = N1-methylpseudouracil
  modified_base 2529: mod_base = OTHER; note = N1-methylpseudouracil
  modified_base 2530: mod_base = OTHER; note = N1-methylpseudouracil
  modified_base 2533: mod_base = OTHER; note = N1-methylpseudouracil
  modified_base 2541: mod_base = OTHER; note = N1-methylpseudouracil
  modified_base 2557: mod_base = OTHER; note = N1-methylpseudouracil
  modified_base 2558: mod_base = OTHER; note = N1-methylpseudouracil
  modified_base 2560: mod_base = OTHER; note = N1-methylpseudouracil
  modified_base 2566: mod_base = OTHER; note = N1-methylpseudouracil
  modified_base 2571: mod_base = OTHER; note = N1-methylpseudouracil
  modified_base 2574: mod_base = OTHER; note = N1-methylpseudouracil
  modified_base 2576: mod_base = OTHER; note = N1-methylpseudouracil
  modified_base 2577: mod_base = OTHER; note = N1-methylpseudouracil
  modified_base 2578: mod_base = OTHER; note = N1-methylpseudouracil
  modified_base 2582: mod_base = OTHER; note = N1-methylpseudouracil
  modified_base 2587: mod_base = OTHER; note = N1-methylpseudouracil
  modified_base 2589: mod_base = OTHER; note = N1-methylpseudouracil
  modified_base 2593: mod_base = OTHER; note = N1-methylpseudouracil
ggaaataagagagaaaagaagagtaagaagaaatataagaccccggcgccgccaccatgggcatcgagctggtgtgcctgttcctgctactcttaggcagaaacgaccacgtgcaaggcggctgcgcctggggaggtgccgagagctgcagcgactgcctgctgaccggccctcactgtgcgtggtgcagccaggagaacttcacccacctgagtggcgccggcgagcgatgcgacacccctgccaacctgctggccaagggctgccagctgcctttcatcgagaaccctgtgagcagaatcgaggtgctgcagaacaagcctctgagcgtgggcagacagaagaacagcagcgacatcgtgcagatcgcccctcagtcacttgtactgaagttgcggcctggcagagagcagaccctgcaggtgcaggtgagacagaccgaggactaccctgtggacctgtactacctgatggatctgagcgccagcatggacgacgacctgaacaccatcaaggaactgggtagcagactggctaaggagatgagcaagctgaccagcaacttcagactgggcttcggcagcttcgtggagaagcctgtttcacctttcatgaagaccacccctgaggagatcaccaacccttgcagcagcatcccttacttctgcctgcctaccttcggcttcaagcacatcctgcctctgaccgacgacgcggagagattcaacgagatcgtgagaaagcagaagatcagcgccaacattgacaccccggaaggcggattcgacgccatcatgcaggccgccgtgtgcaaggagaagatcggctggagaaacgatagcctgcatttgttagtgttcgtgagtgacgcagacagccacttcggcatggactccaagcttgccggcatcgtgatccctaacgacggcctgtgccacctggaccacaggaacgagtacagcatgagcaccgtgctggagtaccctaccatcggccagctgatcgacaagctggtccagaataacgtgctgctgatcttcgccgtgacccaggaacaggttcacctgtacgagaactacgccaagctgatccctggcgccaccgtgggcctcctgcagaaggacagcggcaacatcctccaactgatcatatctgcttacgaggagctgagaagcgaggtggagctggaggtgctcggcgacaccgagggcctgaacctgagcttcaccgccctgtgcaacaacggcgtgctgttccctcaccagaagaagtgtagtcacatgaaggttggcgataccgccagcttcaacgtgaccgtgagcgtgagcaactgcgagaagagaagcagaaaccttataataaagccagttggtctgggcgacacactggagatcctggtgagcgccgagtgcgactgcgattgtcagagagagatcgagacaaattcgtctaagtgccacaacggcaacggatctttccagtgcggcgtgtgcacctgcaaccctggccacatgggaccacactgcgagtgcggagaggacatggtgtcaaccgacagctgtaaggagagcccaggccatccttcttgctccggcagaggcgactgctactgcggccagtgcatctgccatctctccccttacggcagcatctacggcccttactgccagtgcgataacttctcgtgcctgagacacaagggcctgctctgcggcgacaacggcgactgtgattgtggtgagtgtgtgtgcagagacggctggaccggcgagtactgcaactgcaccaccaacagagatagctgtaccagcgaggacggtgtcctctgttccggacggggtgattgcgtttgtggcaagtgtgtttgccgtaacccaggagccagcggccctacctgcgaaaggtgcccgacctgtggagatccgtgtaacagcaagcgaagttgcatcgagtgctatctctccgcagacggccaggcccaggaggagtgcgccgacaagtgcaaggccatcggcgctactatttcggaagaggacttcagcaaggacaccagcgttagctgttcgctgcagggtgagaacgagtgcctgatcaccttcctcatcacgaccgacaacgagggcaagaccatcatccacaacatcaacgagaaggactgccctaagcctcctaacatccctatgatcatgctgggagtgagcctggccatactgcttatcggcgtggttctgctgtgcatttggaagttattagtgagtttccacgacagaaaggaggtggccaagttcgaggccgagaggtccaaggccaagtggcagaccggcacgaacccactgtacagaggcagcaccagcaccttcaagaacgtcacatacaagcaccgggagaagcacaaggccggcctgtcatctgacggcggcaagcctatcccgaatccactcctaggactggatagtacctgataataggctggagcctcggtggcctagcttcttgccccttgggcctccccccagcccctcctccccttcctgcacccgtaccccccaaacaccattgtcacactccagtggtctttgaataaagtctgagtgggcggc

SEQ ID NO: 175 - RNA, 2624 nt, unidentified
  source 1..2624: mol_type = unassigned RNA
  modified_base 6: mod_base = OTHER; note = N1-methylpseudouracil
  modified_base 14: mod_base = OTHER; note = N1-methylpseudouracil
  modified_base 15: mod_base = OTHER; note = N1-methylpseudouracil
  modified_base 16: mod_base = OTHER; note = N1-methylpseudouracil
  modified_base 19: mod_base = OTHER; note = N1-methylpseudouracil
  modified_base 21: mod_base = OTHER; note = N1-methylpseudouracil
  modified_base 22: mod_base = OTHER; note = N1-methylpseudouracil
  modified_base 27: mod_base = OTHER; note = N1-methylpseudouracil
  modified_base 28: mod_base = OTHER; note = N1-methylpseudouracil
  modified_base 32: mod_base = OTHER; note = N1-methylpseudouracil
  modified_base 33: mod_base = OTHER; note = N1-methylpseudouracil
  modified_base 34: mod_base = OTHER; note = N1-methylpseudouracil
  modified_base 36: mod_base = OTHER; note = N1-methylpseudouracil
  modified_base 37: mod_base = OTHER; note = N1-methylpseudouracil
  modified_base 38: mod_base = OTHER; note = N1-methylpseudouracil
  modified_base 39: mod_base = OTHER; note = N1-methylpseudouracil
  modified_base 42: mod_base = OTHER; note = N1-methylpseudouracil
  modified_base 43: mod_base = OTHER; note = N1-methylpseudouracil
  modified_base 44: mod_base = OTHER; note = N1-methylpseudouracil
  modified_base 45: mod_base = OTHER; note = N1-methylpseudouracil
  modified_base 47: mod_base = OTHER; note = N1-methylpseudouracil
  modified_base 54: mod_base = OTHER; note = N1-methylpseudouracil
  modified_base 62: mod_base = OTHER; note = N1-methylpseudouracil
  modified_base 63: mod_base = OTHER; note = N1-methylpseudouracil
  modified_base 64: mod_base = OTHER; note = N1-methylpseudouracil
  modified_base 65: mod_base = OTHER; note = N1-methylpseudouracil
  modified_base 66: mod_base = OTHER; note = N1-methylpseudouracil
  modified_base 68: mod_base = OTHER; note = N1-methylpseudouracil
  modified_base 69: mod_base = OTHER; note = N1-methylpseudouracil
  modified_base 71: mod_base = OTHER; note = N1-methylpseudouracil
  modified_base 77: mod_base = OTHER; note = N1-methylpseudouracil
  modified_base 81: mod_base = OTHER; note = N1-methylpseudouracil
  modified_base 83: mod_base = OTHER; note = N1-methylpseudouracil
  modified_base 89: mod_base = OTHER; note = N1-methylpseudouracil
  modified_base 92: mod_base = OTHER; note = N1-methylpseudouracil
  modified_base 94: mod_base = OTHER; note = N1-methylpseudouracil
  modified_base 96: mod_base = OTHER; note = N1-methylpseudouracil
  modified_base 98: mod_base = OTHER; note = N1-methylpseudouracil
  modified_base 100: mod_base = OTHER; note = N1-methylpseudouracil
  modified_base 101: mod_base = OTHER; note = N1-methylpseudouracil
  modified_base 103: mod_base = OTHER; note = N1-methylpseudouracil
  modified_base 104: mod_base = OTHER; note = N1-methylpseudouracil
  modified_base 105: mod_base = OTHER; note = N1-methylpseudouracil
  modified_base 107: mod_base = OTHER; note = N1-methylpseudouracil
  modified_base 109: mod_base = OTHER; note = N1-methylpseudouracil
  modified_base 110: mod_base = OTHER; note = N1-methylpseudouracil
  modified_base 111: mod_base = OTHER; note = N1-methylpseudouracil
  modified_base 113: mod_base = OTHER; note = N1-methylpseudouracil
  modified_base 131: mod_base = OTHER; note = N1-methylpseudouracil
  modified_base 142: mod_base = OTHER; note = N1-methylpseudouracil
  modified_base 149: mod_base = OTHER; note = N1-methylpseudouracil
  modified_base 166: mod_base = OTHER; note = N1-methylpseudouracil
  modified_base 175: mod_base = OTHER; note = N1-methylpseudouracil
  modified_base 179: mod_base = OTHER; note = N1-methylpseudouracil
  modified_base 182: mod_base = OTHER; note = N1-methylpseudouracil
  modified_base 185: mod_base = OTHER; note = N1-methylpseudouracil
  modified_base 196: mod_base = OTHER; note = N1-methylpseudouracil
  modified_base 198: mod_base = OTHER; note = N1-methylpseudouracil
  modified_base 202: mod_base = OTHER; note = N1-methylpseudouracil
  modified_base 205: mod_base = OTHER; note = N1-methylpseudouracil
  modified_base 207: mod_base = OTHER; note = N1-methylpseudouracil
  modified_base 220: mod_base = OTHER; note = N1-methylpseudouracil
  modified_base 221: mod_base = OTHER; note = N1-methylpseudouracil
  modified_base 239: mod_base = OTHER; note = N1-methylpseudouracil
  modified_base 250: mod_base = OTHER; note = N1-methylpseudouracil
  modified_base 261: mod_base = OTHER; note = N1-methylpseudouracil
  modified_base 267: mod_base = OTHER; note = N1-methylpseudouracil
  modified_base 269: mod_base = OTHER; note = N1-methylpseudouracil
  modified_base 272: mod_base = OTHER; note = N1-methylpseudouracil
  modified_base 283: mod_base = OTHER; note = N1-methylpseudouracil
  modified_base 290: mod_base = OTHER; note = N1-methylpseudouracil
  modified_base 294: mod_base = OTHER; note = N1-methylpseudouracil
  modified_base 295: mod_base = OTHER; note = N1-methylpseudouracil
  modified_base 296: mod_base = OTHER; note = N1-methylpseudouracil
  modified_base 299: mod_base = OTHER; note = N1-methylpseudouracil
  modified_base 306: mod_base = OTHER; note = N1-methylpseudouracil
  modified_base 311: mod_base = OTHER; note = N1-methylpseudouracil
  modified_base 320: mod_base = OTHER; note = N1-methylpseudouracil
  modified_base 326: mod_base = OTHER; note = N1-methylpseudouracil
  modified_base 327: mod_base = OTHER; note = N1-methylpseudouracil
  modified_base 329: mod_base = OTHER; note = N1-methylpseudouracil
  modified_base 342: mod_base = OTHER; note = N1-methylpseudouracil
  modified_base 344: mod_base = OTHER; note = N1-methylpseudouracil
  modified_base 350: mod_base = OTHER; note = N1-methylpseudouracil
  modified_base 367: mod_base = OTHER; note = N1-methylpseudouracil
  modified_base 369: mod_base = OTHER; note = N1-methylpseudouracil
  modified_base 370: mod_base = OTHER; note = N1-methylpseudouracil
  modified_base 372: mod_base = OTHER; note = N1-methylpseudouracil
  modified_base 377: mod_base = OTHER; note = N1-methylpseudouracil
  modified_base 380: mod_base = OTHER; note = N1-methylpseudouracil
  modified_base 386: mod_base = OTHER; note = N1-methylpseudouracil
  modified_base 393: mod_base = OTHER; note = N1-methylpseudouracil
  modified_base 401: mod_base = OTHER; note = N1-methylpseudouracil
  modified_base 404: mod_base = OTHER; note = N1-methylpseudouracil
  modified_base 405: mod_base = OTHER; note = N1-methylpseudouracil
  modified_base 407: mod_base = OTHER; note = N1-methylpseudouracil
  modified_base 413: mod_base = OTHER; note = N1-methylpseudouracil
  modified_base 429: mod_base = OTHER; note = N1-methylpseudouracil
  modified_base 437: mod_base = OTHER; note = N1-methylpseudouracil
  modified_base 443: mod_base = OTHER; note = N1-methylpseudouracil
  modified_base 449: mod_base = OTHER; note = N1-methylpseudouracil
  modified_base 459: mod_base = OTHER; note = N1-methylpseudouracil
  modified_base 466: mod_base = OTHER; note = N1-methylpseudouracil
  modified_base 473: mod_base = OTHER; note = N1-methylpseudouracil
  modified_base 479: mod_base = OTHER; note = N1-methylpseudouracil
  modified_base 481: mod_base = OTHER; note = N1-methylpseudouracil
  modified_base 484: mod_base = OTHER; note = N1-methylpseudouracil
  modified_base 488: mod_base = OTHER; note = N1-methylpseudouracil
  modified_base 491: mod_base = OTHER; note = N1-methylpseudouracil
  modified_base 495: mod_base = OTHER; note = N1-methylpseudouracil
  modified_base 497: mod_base = OTHER; note = N1-methylpseudouracil
  modified_base 499: mod_base = OTHER; note = N1-methylpseudouracil
  modified_base 509: mod_base = OTHER; note = N1-methylpseudouracil
  modified_base 519: mod_base = OTHER; note = N1-methylpseudouracil
  modified_base 521: mod_base = OTHER; note = N1-methylpseudouracil
  modified_base 530: mod_base = OTHER; note = N1-methylpseudouracil
  modified_base 531: mod_base = OTHER; note = N1-methylpseudouracil
  modified_base 539: mod_base = OTHER; note = N1-methylpseudouracil
  modified_base 551: mod_base = OTHER; note = N1-methylpseudouracil
  modified_base 553: mod_base = OTHER; note = N1-methylpseudouracil
  modified_base 555: mod_base = OTHER; note = N1-methylpseudouracil
  modified_base 563: mod_base = OTHER; note = N1-methylpseudouracil
  modified_base 565: mod_base = OTHER; note = N1-methylpseudouracil
  modified_base 572: mod_base = OTHER; note = N1-methylpseudouracil
  modified_base 583: mod_base = OTHER; note = N1-methylpseudouracil
  modified_base 584: mod_base = OTHER; note = N1-methylpseudouracil
  modified_base 590: mod_base = OTHER; note = N1-methylpseudouracil
  modified_base 595: mod_base = OTHER; note = N1-methylpseudouracil
  modified_base 596: mod_base = OTHER; note = N1-methylpseudouracil
  modified_base 604: mod_base = OTHER; note = N1-methylpseudouracil
  modified_base 605: mod_base = OTHER; note = N1-methylpseudouracil
  modified_base 606: mod_base = OTHER; note = N1-methylpseudouracil
  modified_base 608: mod_base = OTHER; note = N1-methylpseudouracil
  modified_base 618: mod_base = OTHER; note = N1-methylpseudouracil
  modified_base 620: mod_base = OTHER; note = N1-methylpseudouracil
  modified_base 622: mod_base = OTHER; note = N1-methylpseudouracil
  modified_base 624: mod_base = OTHER; note = N1-methylpseudouracil
  modified_base 627: mod_base = OTHER; note = N1-methylpseudouracil
  modified_base 628: mod_base = OTHER; note = N1-methylpseudouracil
  modified_base 629: mod_base = OTHER; note = N1-methylpseudouracil
  modified_base 632: mod_base = OTHER; note = N1-methylpseudouracil
  modified_base 653: mod_base = OTHER; note = N1-methylpseudouracil
  modified_base 664: mod_base = OTHER; note = N1-methylpseudouracil
  modified_base 666: mod_base = OTHER; note = N1-methylpseudouracil
  modified_base 674: mod_base = OTHER; note = N1-methylpseudouracil
  modified_base 679: mod_base = OTHER; note = N1-methylpseudouracil
  modified_base 682: mod_base = OTHER; note = N1-methylpseudouracil
  modified_base 683: mod_base = OTHER; note = N1-methylpseudouracil
  modified_base 685: mod_base = OTHER; note = N1-methylpseudouracil
  modified_base 689: mod_base = OTHER; note = N1-methylpseudouracil
  modified_base 693: mod_base = OTHER; note = N1-methylpseudouracil
  modified_base 697: mod_base = OTHER; note = N1-methylpseudouracil
  modified_base 698: mod_base = OTHER; note = N1-methylpseudouracil
  modified_base 703: mod_base = OTHER; note = N1-methylpseudouracil
  modified_base 704: mod_base = OTHER; note = N1-methylpseudouracil
  modified_base 713: mod_base = OTHER; note = N1-methylpseudouracil
  modified_base 714: mod_base = OTHER; note = N1-methylpseudouracil
  modified_base 716: mod_base = OTHER; note = N1-methylpseudouracil
  modified_base 720: mod_base = OTHER; note = N1-methylpseudouracil
  modified_base 722: mod_base = OTHER; note = N1-methylpseudouracil
  modified_base 742: mod_base = OTHER; note = N1-methylpseudouracil
  modified_base 743: mod_base = OTHER; note = N1-methylpseudouracil
  modified_base 744: mod_base = OTHER; note = N1-methylpseudouracil
  modified_base 752: mod_base = OTHER; note = N1-methylpseudouracil
  modified_base 755: mod_base = OTHER; note = N1-methylpseudouracil
  modified_base 762: mod_base = OTHER; note = N1-methylpseudouracil
  modified_base 770: mod_base = OTHER; note = N1-methylpseudouracil
  modified_base 782: mod_base = OTHER; note = N1-methylpseudouracil
  modified_base 783: mod_base = OTHER; note = N1-methylpseudouracil
  modified_base 786: mod_base = OTHER; note = N1-methylpseudouracil
  modified_base 789: mod_base = OTHER; note = N1-methylpseudouracil
  modified_base 792: mod_base = OTHER; note = N1-methylpseudouracil
  modified_base 802: mod_base = OTHER; note = N1-methylpseudouracil
  modified_base 803: mod_base = OTHER; note = N1-methylpseudouracil
  modified_base 812: mod_base = OTHER; note = N1-methylpseudouracil
  modified_base 815: mod_base = OTHER; note = N1-methylpseudouracil
  modified_base 822: mod_base = OTHER; note = N1-methylpseudouracil
  modified_base 827: mod_base = OTHER; note = N1-methylpseudouracil
  modified_base 829: mod_base = OTHER; note = N1-methylpseudouracil
  modified_base 842: mod_base = OTHER; note = N1-methylpseudouracil
  modified_base 847: mod_base = OTHER; note = N1-methylpseudouracil
  modified_base 863: mod_base = OTHER; note = N1-methylpseudouracil
  modified_base 869: mod_base = OTHER; note = N1-methylpseudouracil
  modified_base 872: mod_base = OTHER; note = N1-methylpseudouracil
  modified_base 875: mod_base = OTHER; note = N1-methylpseudouracil
  modified_base 877: mod_base = OTHER; note = N1-methylpseudouracil
  modified_base 878: mod_base = OTHER; note = N1-methylpseudouracil
  modified_base 881: mod_base = OTHER; note = N1-methylpseudouracil
  modified_base 901: mod_base = OTHER; note = N1-methylpseudouracil
  modified_base 902: mod_base = OTHER; note = N1-methylpseudouracil
  modified_base 903: mod_base = OTHER; note = N1-methylpseudouracil
  modified_base 908: mod_base = OTHER; note = N1-methylpseudouracil
  modified_base 913: mod_base = OTHER; note = N1-methylpseudouracil
  modified_base 920: mod_base = OTHER; note = N1-methylpseudouracil
  modified_base 929: mod_base = OTHER; note = N1-methylpseudouracil
  modified_base 932: mod_base = OTHER; note = N1-methylpseudouracil
  modified_base 935: mod_base = OTHER; note = N1-methylpseudouracil
  modified_base 950: mod_base = OTHER; note = N1-methylpseudouracil
  modified_base 952: mod_base = OTHER; note = N1-methylpseudouracil
  modified_base 954: mod_base = OTHER; note = N1-methylpseudouracil
  modified_base 959: mod_base = OTHER; note = N1-methylpseudouracil
  modified_base 963: mod_base = OTHER; note = N1-methylpseudouracil
  modified_base 964: mod_base = OTHER; note = N1-methylpseudouracil
  modified_base 976: mod_base = OTHER; note = N1-methylpseudouracil
  modified_base 983: mod_base = OTHER; note = N1-methylpseudouracil
  modified_base 992: mod_base = OTHER; note = N1-methylpseudouracil
  modified_base 995: mod_base = OTHER; note = N1-methylpseudouracil
  modified_base 1000: mod_base = OTHER; note = N1-methylpseudouracil
  modified_base 1010: mod_base = OTHER; note = N1-methylpseudouracil
  modified_base 1011: mod_base = OTHER; note = N1-methylpseudouracil
  modified_base 1019: mod_base = OTHER; note = N1-methylpseudouracil
  modified_base 1022: mod_base = OTHER; note = N1-methylpseudouracil
  modified_base 1023: mod_base = OTHER; note = N1-methylpseudouracil
  modified_base 1026: mod_base = OTHER; note = N1-methylpseudouracil
  modified_base 1031: mod_base = OTHER; note = N1-methylpseudouracil
  modified_base 1034: mod_base = OTHER; note = N1-methylpseudouracil
  modified_base 1046: mod_base = OTHER; note = N1-methylpseudouracil
  modified_base 1049: mod_base = OTHER; note = N1-methylpseudouracil
  modified_base 1052: mod_base = OTHER; note = N1-methylpseudouracil
  modified_base 1055: mod_base = OTHER; note = N1-methylpseudouracil
  modified_base 1057: mod_base = OTHER; note = N1-methylpseudouracil
  modified_base 1058: mod_base = OTHER; note = N1-methylpseudouracil
  modified_base 1059: mod_base = OTHER; note = N1-methylpseudouracil
  modified_base 1064: mod_base = OTHER; note = N1-methylpseudouracil
  modified_base 1079: mod_base = OTHER; note = N1-methylpseudouracil
  modified_base 1085: mod_base = OTHER; note = N1-methylpseudouracil
  modified_base 1087: mod_base = OTHER; note = N1-methylpseudouracil
  modified_base 1095: mod_base = OTHER; note = N1-methylpseudouracil
  modified_base 1096: mod_base = OTHER; note = N1-methylpseudouracil
  modified_base 1106: mod_base = OTHER; note = N1-methylpseudouracil
  modified_base 1109: mod_base = OTHER; note = N1-methylpseudouracil
  modified_base 1122: mod_base = OTHER; note = N1-methylpseudouracil
  modified_base 1124: mod_base = OTHER; note = N1-methylpseudouracil
  modified_base 1130: mod_base = OTHER; note = N1-methylpseudouracil
  modified_base 1133: mod_base = OTHER; note = N1-methylpseudouracil
  modified_base 1144: mod_base = OTHER; note = N1-methylpseudouracil
  modified_base 1154: mod_base = OTHER; note = N1-methylpseudouracil
  modified_base 1157: mod_base = OTHER; note = N1-methylpseudouracil
  modified_base 1163: mod_base = OTHER; note = N1-methylpseudouracil
  modified_base 1166: mod_base = OTHER; note = N1-methylpseudouracil
  modified_base 1169: mod_base = OTHER; note = N1-methylpseudouracil
  modified_base 1171: mod_base = OTHER; note = N1-methylpseudouracil
  modified_base 1177: mod_base = OTHER; note = N1-methylpseudouracil
  modified_base 1187: mod_base = OTHER; note = N1-methylpseudouracil
  modified_base 1199: mod_base = OTHER; note = N1-methylpseudouracil
  modified_base 1205: mod_base = OTHER; note = N1-methylpseudouracil
  modified_base 1211: mod_base = OTHER; note = N1-methylpseudouracil
  modified_base 1214: mod_base = OTHER; note = N1-methylpseudouracil
  modified_base 1232: mod_base = OTHER; note = N1-methylpseudouracil
  modified_base 1238: mod_base = OTHER; note = N1-methylpseudouracil
  modified_base 1243: mod_base = OTHER; note = N1-methylpseudouracil
  modified_base 1244: mod_base = OTHER; note = N1-methylpseudouracil
  modified_base 1245: mod_base = OTHER; note = N1-methylpseudouracil
  modified_base 1253: mod_base = OTHER; note = N1-methylpseudouracil
  modified_base 1255: mod_base = OTHER; note = N1-methylpseudouracil
  modified_base 1269: mod_base = OTHER; note = N1-methylpseudouracil
  modified_base 1271: mod_base = OTHER; note = N1-methylpseudouracil
  modified_base 1273: mod_base = OTHER; note = N1-methylpseudouracil
  modified_base 1274: mod_base = OTHER; note = N1-methylpseudouracil
  modified_base 1291: mod_base = OTHER; note = N1-methylpseudouracil
  modified_base 1294: mod_base = OTHER; note = N1-methylpseudouracil
  modified_base 1296: mod_base = OTHER; note = N1-methylpseudouracil
  modified_base 1301: mod_base = OTHER; note = N1-methylpseudouracil
  modified_base 1307: mod_base = OTHER; note = N1-methylpseudouracil
  modified_base 1321: mod_base = OTHER; note = N1-methylpseudouracil
  modified_base 1324: mod_base = OTHER; note = N1-methylpseudouracil
  modified_base 1325: mod_base = OTHER; note = N1-methylpseudouracil
  modified_base 1331: mod_base = OTHER; note = N1-methylpseudouracil
  modified_base 1337: mod_base = OTHER; note = N1-methylpseudouracil
  modified_base 1343: mod_base = OTHER; note = N1-methylpseudouracil
  modified_base 1347: mod_base = OTHER; note = N1-methylpseudouracil
  modified_base 1351: mod_base = OTHER; note = N1-methylpseudouracil
  modified_base 1353: mod_base = OTHER; note = N1-methylpseudouracil
  modified_base 1373: mod_base = OTHER; note = N1-methylpseudouracil
  modified_base 1376: mod_base = OTHER; note = N1-methylpseudouracil
  modified_base 1379: mod_base = OTHER; note = N1-methylpseudouracil
  modified_base 1388: mod_base = OTHER; note = N1-methylpseudouracil
  modified_base 1394: mod_base = OTHER; note = N1-methylpseudouracil
  modified_base 1406: mod_base = OTHER; note = N1-methylpseudouracil
  modified_base 1412: mod_base = OTHER; note = N1-methylpseudouracil
  modified_base 1415: mod_base = OTHER; note = N1-methylpseudouracil
  modified_base 1418: mod_base = OTHER; note = N1-methylpseudouracil
  modified_base 1420: mod_base = OTHER; note = N1-methylpseudouracil
  modified_base 1425: mod_base = OTHER; note = N1-methylpseudouracil
  modified_base 1429: mod_base = OTHER; note = N1-methylpseudouracil
  modified_base 1431: mod_base = OTHER; note = N1-methylpseudouracil
  modified_base 1435: mod_base = OTHER; note = N1-methylpseudouracil
  modified_base 1441: mod_base = OTHER; note = N1-methylpseudouracil
  modified_base 1454: mod_base = OTHER; note = N1-methylpseudouracil
  modified_base 1460: mod_base = OTHER; note = N1-methylpseudouracil
  modified_base 1468: mod_base = OTHER; note = N1-methylpseudouracil
  modified_base 1470: mod_base = OTHER; note = N1-methylpseudouracil
  modified_base 1474: mod_base = OTHER; note = N1-methylpseudouracil
  modified_base 1495: mod_base = OTHER; note = N1-methylpseudouracil
  modified_base 1496: mod_base = OTHER; note = N1-methylpseudouracil
  modified_base 1501: mod_base = OTHER; note = N1-methylpseudouracil
  modified_base 1508: mod_base = OTHER; note = N1-methylpseudouracil
  modified_base 1510: mod_base = OTHER; note = N1-methylpseudouracil
  modified_base 1516: mod_base = OTHER; note = N1-methylpseudouracil
  modified_base 1532: mod_base = OTHER; note = N1-methylpseudouracil
  modified_base 1539: mod_base = OTHER; note = N1-methylpseudouracil
  modified_base 1543: mod_base = OTHER; note = N1-methylpseudouracil
  modified_base 1549: mod_base = OTHER; note = N1-methylpseudouracil
  modified_base 1562: mod_base = OTHER; note = N1-methylpseudouracil
  modified_base 1565: mod_base = OTHER; note = N1-methylpseudouracil
  modified_base 1567: mod_base = OTHER; note = N1-methylpseudouracil
  modified_base 1569: mod_base = OTHER; note = N1-methylpseudouracil
  modified_base 1579: mod_base = OTHER; note = N1-methylpseudouracil
  modified_base 1593: mod_base = OTHER; note = N1-methylpseudouracil
  modified_base 1602: mod_base = OTHER; note = N1-methylpseudouracil
  modified_base 1606: mod_base = OTHER; note = N1-methylpseudouracil
  modified_base 1609: mod_base = OTHER; note = N1-methylpseudouracil
  modified_base 1611: mod_base = OTHER; note = N1-methylpseudouracil
  modified_base 1624: mod_base = OTHER; note = N1-methylpseudouracil
  modified_base 1627: mod_base = OTHER; note = N1-methylpseudouracil
  modified_base 1630: mod_base = OTHER; note = N1-methylpseudouracil
  modified_base 1639: mod_base = OTHER; note = N1-methylpseudouracil
  modified_base 1643: mod_base = OTHER; note = N1-methylpseudouracil
  modified_base 1645: mod_base = OTHER; note = N1-methylpseudouracil
  modified_base 1652: mod_base = OTHER; note = N1-methylpseudouracil
  modified_base 1654: mod_base = OTHER; note = N1-methylpseudouracil
  modified_base 1659: mod_base = OTHER; note = N1-methylpseudouracil
  modified_base 1660: mod_base = OTHER; note = N1-methylpseudouracil
  modified_base 1670: mod_base = OTHER; note = N1-methylpseudouracil
  modified_base 1671: mod_base = OTHER; note = N1-methylpseudouracil
  modified_base 1672: mod_base = OTHER; note = N1-methylpseudouracil
  modified_base 1681: mod_base = OTHER; note = N1-methylpseudouracil
  modified_base 1684: mod_base = OTHER; note = N1-methylpseudouracil
  modified_base 1690: mod_base = OTHER; note = N1-methylpseudouracil
  modified_base 1692: mod_base = OTHER; note = N1-methylpseudouracil
  modified_base 1695: mod_base = OTHER; note = N1-methylpseudouracil
  modified_base 1699: mod_base = OTHER; note = N1-methylpseudouracil
  modified_base 1700: mod_base = OTHER; note = N1-methylpseudouracil
  modified_base 1701: mod_base = OTHER; note = N1-methylpseudouracil
  modified_base 1702: mod_base = OTHER; note = N1-methylpseudouracil
  modified_base 1705: mod_base = OTHER; note = N1-methylpseudouracil
  modified_base 1709: mod_base = OTHER; note = N1-methylpseudouracil
  modified_base 1724: mod_base = OTHER; note = N1-methylpseudouracil
  modified_base 1727: mod_base = OTHER; note = N1-methylpseudouracil
  modified_base 1729: mod_base = OTHER; note = N1-methylpseudouracil
  modified_base 1740: mod_base = OTHER; note = N1-methylpseudouracil
  modified_base 1747: mod_base = OTHER; note = N1-methylpseudouracil
  modified_base 1753: mod_base = OTHER; note = N1-methylpseudouracil
  modified_base 1762: mod_base = OTHER; note = N1-methylpseudouracil
  modified_base 1766: mod_base = OTHER; note = N1-methylpseudouracil
  modified_base 1768: mod_base = OTHER; note = N1-methylpseudouracil
  modified_base 1770: mod_base = OTHER; note = N1-methylpseudouracil
  modified_base 1780: mod_base = OTHER; note = N1-methylpseudouracil
  modified_base 1792: mod_base = OTHER; note = N1-methylpseudouracil
  modified_base 1795: mod_base = OTHER; note = N1-methylpseudouracil
  modified_base 1801: mod_base = OTHER; note = N1-methylpseudouracil
  modified_base 1806: mod_base = OTHER; note = N1-methylpseudouracil
  modified_base 1809: mod_base = OTHER; note = N1-methylpseudouracil
  modified_base 1810: mod_base = OTHER; note = N1-methylpseudouracil
  modified_base 1815: mod_base = OTHER; note = N1-methylpseudouracil
  modified_base 1822: mod_base = OTHER; note = N1-methylpseudouracil
  modified_base 1824: mod_base = OTHER; note = N1-methylpseudouracil
  modified_base 1826: mod_base = OTHER; note = N1-methylpseudouracil
  modified_base 1841: mod_base = OTHER; note = N1-methylpseudouracil
  modified_base 1844: mod_base = OTHER; note = N1-methylpseudouracil
  modified_base 1846: mod_base = OTHER; note = N1-methylpseudouracil
  modified_base 1848: mod_base = OTHER; note = N1-methylpseudouracil
  modified_base 1849: mod_base = OTHER; note = N1-methylpseudouracil
  modified_base 1851: mod_base = OTHER; note = N1-methylpseudouracil
  modified_base 1864: mod_base = OTHER; note = N1-methylpseudouracil
  modified_base 1868: mod_base = OTHER; note = N1-methylpseudouracil
  modified_base 1870: mod_base = OTHER; note = N1-methylpseudouracil
  modified_base 1879: mod_base = OTHER; note = N1-methylpseudouracil
  modified_base 1883: mod_base = OTHER; note = N1-methylpseudouracil
  modified_base 1885: mod_base = OTHER; note = N1-methylpseudouracil
  modified_base 1890: mod_base = OTHER; note = N1-methylpseudouracil
  modified_base 1893: mod_base = OTHER; note = N1-methylpseudouracil
  modified_base 1903: mod_base = OTHER; note = N1-methylpseudouracil
  modified_base 1915: mod_base = OTHER; note = N1-methylpseudouracil
  modified_base 1924: mod_base = OTHER; note = N1-methylpseudouracil
  modified_base 1926: mod_base = OTHER; note = N1-methylpseudouracil
  modified_base 1933: mod_base = OTHER; note = N1-methylpseudouracil
  modified_base 1944: mod_base = OTHER; note = N1-methylpseudouracil
  modified_base 1945: mod_base = OTHER; note = N1-methylpseudouracil
  modified_base 1960: mod_base = OTHER; note = N1-methylpseudouracil
  modified_base 1963: mod_base = OTHER; note = N1-methylpseudouracil
  modified_base 1967: mod_base = OTHER; note = N1-methylpseudouracil
  modified_base 1972: mod_base = OTHER; note = N1-methylpseudouracil
  modified_base 1979: mod_base = OTHER; note = N1-methylpseudouracil
  modified_base 1981: mod_base = OTHER; note = N1-methylpseudouracil
  modified_base 2008: mod_base = OTHER; note = N1-methylpseudouracil
  modified_base 2012: mod_base = OTHER; note = N1-methylpseudouracil
  modified_base 2016: mod_base = OTHER; note = N1-methylpseudouracil
  modified_base 2020: mod_base = OTHER; note = N1-methylpseudouracil
  modified_base 2022: mod_base = OTHER; note = N1-methylpseudouracil
  modified_base 2027: mod_base = OTHER; note = N1-methylpseudouracil
  modified_base 2037: mod_base = OTHER; note = N1-methylpseudouracil
  modified_base 2042: mod_base = OTHER; note = N1-methylpseudouracil
  modified_base 2043: mod_base = OTHER; note = N1-methylpseudouracil
  modified_base 2059: mod_base = OTHER; note = N1-methylpseudouracil
  modified_base 2060: mod_base = OTHER; note = N1-methylpseudouracil
  modified_base 2062: mod_base = OTHER; note = N1-methylpseudouracil
  modified_base 2078: mod_base = OTHER; note = N1-methylpseudouracil
  modified_base 2083: mod_base = OTHER; note = N1-methylpseudouracil
  modified_base 2086: mod_base = OTHER; note = N1-methylpseudouracil
  modified_base 2090: mod_base = OTHER; note = N1-methylpseudouracil
  modified_base 2107: mod_base = OTHER; note = N1-methylpseudouracil
  modified_base 2111: mod_base = OTHER; note = N1-methylpseudouracil
  modified_base 2114: mod_base = OTHER; note = N1-methylpseudouracil
  modified_base 2118: mod_base = OTHER; note = N1-methylpseudouracil
  modified_base 2119: mod_base = OTHER; note = N1-methylpseudouracil
  modified_base 2120: mod_base = OTHER; note = N1-methylpseudouracil
  modified_base 2123: mod_base = OTHER; note = N1-methylpseudouracil
  modified_base 2126: mod_base = OTHER; note = N1-methylpseudouracil
  modified_base 2133: mod_base = OTHER; note = N1-methylpseudouracil
  modified_base 2136: mod_base = OTHER; note = N1-methylpseudouracil
  modified_base 2153: mod_base = OTHER; note = N1-methylpseudouracil
  modified_base 2156: mod_base = OTHER; note = N1-methylpseudouracil
  modified_base 2157: mod_base = OTHER; note = N1-methylpseudouracil
  modified_base 2161: mod_base = OTHER; note = N1-methylpseudouracil
  modified_base 2163: mod_base = OTHER; note = N1-methylpseudouracil
  modified_base 2165: mod_base = OTHER; note = N1-methylpseudouracil
  modified_base 2178: mod_base = OTHER; note = N1-methylpseudouracil
  modified_base 2179: mod_base = OTHER; note = N1-methylpseudouracil
  modified_base 2181: mod_base = OTHER; note = N1-methylpseudouracil
  modified_base 2198: mod_base = OTHER; note = N1-methylpseudouracil
  modified_base 2199: mod_base = OTHER; note = N1-methylpseudouracil
  modified_base 2204: mod_base = OTHER; note = N1-methylpseudouracil
  modified_base 2207: mod_base = OTHER; note = N1-methylpseudouracil
  modified_base 2210: mod_base = OTHER; note = N1-methylpseudouracil
  modified_base 2213: mod_base = OTHER; note = N1-methylpseudouracil
  modified_base 2219: mod_base = OTHER; note = N1-methylpseudouracil
  modified_base 2221: mod_base = OTHER; note = N1-methylpseudouracil
  modified_base 2225: mod_base = OTHER; note = N1-methylpseudouracil
  modified_base 2231: mod_base = OTHER; note = N1-methylpseudouracil
  modified_base 2234: mod_base = OTHER; note = N1-methylpseudouracil
  modified_base 2237: mod_base = OTHER; note = N1-methylpseudouracil
  modified_base 2240: mod_base = OTHER; note = N1-methylpseudouracil
  modified_base 2246: mod_base = OTHER; note = N1-methylpseudouracil
  modified_base 2249: mod_base = OTHER; note = N1-methylpseudouracil
  modified_base 2252: mod_base = OTHER; note = N1-methylpseudouracil
  modified_base 2255: mod_base = OTHER; note = N1-methylpseudouracil
  modified_base 2257: mod_base = OTHER; note = N1-methylpseudouracil
  modified_base 2261: mod_base = OTHER; note = N1-methylpseudouracil
  modified_base 2263: mod_base = OTHER; note = N1-methylpseudouracil
  modified_base 2270: mod_base = OTHER; note = N1-methylpseudouracil
  modified_base 2273: mod_base = OTHER; note = N1-methylpseudouracil
  modified_base 2276: mod_base = OTHER; note = N1-methylpseudouracil
  modified_base 2278: mod_base = OTHER; note = N1-methylpseudouracil
  modified_base 2281: mod_base = OTHER; note = N1-methylpseudouracil
  modified_base 2282: mod_base = OTHER; note = N1-methylpseudouracil
  modified_base 2300: mod_base = OTHER; note = N1-methylpseudouracil
  modified_base 2308: mod_base = OTHER; note = N1-methylpseudouracil
  modified_base 2309: mod_base = OTHER; note = N1-methylpseudouracil
  modified_base 2310: mod_base = OTHER; note = N1-methylpseudouracil
  modified_base 2323: mod_base = OTHER; note = N1-methylpseudouracil
  modified_base 2325: mod_base = OTHER; note = N1-methylpseudouracil
  modified_base 2335: mod_base = OTHER; note = N1-methylpseudouracil
  modified_base 2352: mod_base = OTHER; note = N1-methylpseudouracil
  modified_base 2355: mod_base = OTHER; note = N1-methylpseudouracil
  modified_base 2357: mod_base = OTHER; note = N1-methylpseudouracil
  modified_base 2359: mod_base = OTHER; note = N1-methylpseudouracil
  modified_base 2368: mod_base = OTHER; note = N1-methylpseudouracil
  modified_base 2370: mod_base = OTHER; note = N1-methylpseudouracil
  modified_base 2373: mod_base = OTHER; note = N1-methylpseudouracil
  modified_base 2374: mod_base = OTHER; note = N1-methylpseudouracil
  modified_base 2376: mod_base = OTHER; note = N1-methylpseudouracil
  modified_base 2380: mod_base = OTHER; note = N1-methylpseudouracil
  modified_base 2381: mod_base = OTHER; note = N1-methylpseudouracil
  modified_base 2390: mod_base = OTHER; note = N1-methylpseudouracil
  modified_base 2394: mod_base = OTHER; note = N1-methylpseudouracil
  modified_base 2395: mod_base = OTHER; note = N1-methylpseudouracil
  modified_base 2420: mod_base = OTHER; note = N1-methylpseudouracil
  modified_base 2426: mod_base = OTHER; note = N1-methylpseudouracil
  modified_base 2428: mod_base = OTHER; note = N1-methylpseudouracil
  modified_base 2436: mod_base = OTHER; note = N1-methylpseudouracil
  modified_base 2437: mod_base = OTHER; note = N1-methylpseudouracil
  modified_base 2440: mod_base = OTHER; note = N1-methylpseudouracil
  modified_base 2448: mod_base = OTHER; note = N1-methylpseudouracil
  modified_base 2464: mod_base = OTHER; note = N1-methylpseudouracil
  modified_base 2465: mod_base = OTHER; note = N1-methylpseudouracil
  modified_base 2467: mod_base = OTHER; note = N1-methylpseudouracil
  modified_base 2473: mod_base = OTHER; note = N1-methylpseudouracil
  modified_base 2480: mod_base = OTHER; note = N1-methylpseudouracil
  modified_base 2484: mod_base = OTHER; note = N1-methylpseudouracil
  modified_base 2489: mod_base = OTHER; note = N1-methylpseudouracil
  modified_base 2493: mod_base = OTHER; note = N1-methylpseudouracil
  modified_base 2494: mod_base = OTHER; note = N1-methylpseudouracil
  modified_base 2496: mod_base = OTHER; note = N1-methylpseudouracil
  modified_base 2497: mod_base = OTHER; note = N1-methylpseudouracil
  modified_base 2503: mod_base = OTHER; note = N1-methylpseudouracil
  modified_base 2504: mod_base = OTHER; note = N1-methylpseudouracil
  modified_base 2519: mod_base = OTHER; note = N1-methylpseudouracil
  modified_base 2520: mod_base = OTHER; note = N1-methylpseudouracil
  modified_base 2522: mod_base = OTHER; note = N1-methylpseudouracil
  modified_base 2528: mod_base = OTHER; note = N1-methylpseudouracil
  modified_base 2532: mod_base = OTHER; note = N1-methylpseudouracil
  modified_base 2545: mod_base = OTHER; note = N1-methylpseudouracil
  modified_base 2548: mod_base = OTHER; note = N1-methylpseudouracil
  modified_base 2553: mod_base = OTHER; note = N1-methylpseudouracil
  modified_base 2554: mod_base = OTHER; note = N1-methylpseudouracil
  modified_base 2557: mod_base = OTHER; note = N1-methylpseudouracil
  modified_base 2565: mod_base = OTHER; note = N1-methylpseudouracil
  modified_base 2581: mod_base = OTHER; note = N1-methylpseudouracil
  modified_base 2582: mod_base = OTHER; note = N1-methylpseudouracil
  modified_base 2584: mod_base = OTHER; note = N1-methylpseudouracil
  modified_base 2590: mod_base = OTHER; note = N1-methylpseudouracil
  modified_base 2595: mod_base = OTHER; note = N1-methylpseudouracil
  modified_base 2598: mod_base = OTHER; note = N1-methylpseudouracil
  modified_base 2600: mod_base = OTHER; note = N1-methylpseudouracil
  modified_base 2601: mod_base = OTHER; note = N1-methylpseudouracil
  modified_base 2602: mod_base = OTHER; note = N1-methylpseudouracil
  modified_base 2606: mod_base = OTHER; note = N1-methylpseudouracil
  modified_base 2611: mod_base = OTHER; note = N1-methylpseudouracil
  modified_base 2613: mod_base = OTHER; note = N1-methylpseudouracil
  modified_base 2617: mod_base = OTHER; note = N1-methylpseudouracil
ggaaatcgcaaaatttgctcttcgcgttagatttcttttagttttctcgcaactagcaagctttttgttctcgccatgggtatcgagctgctgtgtctgttctttctgtttctgggccgcaacgaccacgtccagggcggctgcgccctgggcggggccgagacctgcgaggactgcctgctcatcgggccacagtgtgcctggtgtgcacaggagaacttcacccaccccagcggggtgggcgagaggtgcgacacccctgcaaatctgctggcaaagggctgccagctgaatttcatcgagaatcccgtcagccaggtggagattctcaagaacaagcctctgagcgtcggacggcagaagaactcttctgacatcgtccagatcgcacctcagagcctgattctgaagctccgcccaggcggagctcagaccctccaggtccacgtcaggcagactgaggactaccccgtggacctgtactacctgatggatctgtccgccagcatggacgacgatctgaacaccattaaggagctgggcagccggctctctaaggagatgtccaagctcaccagcaacttcaggctgggattcggcagctttgtcgagaagcctgtgtctcctttcgtgaagaccacaccagaggagatcgcaaacccctgtagcagcatcccctacttctgcctgcctacattcgggttcaagcacattctgcctctgaccaacgacgcagagcgctttaacgagatcgtgaagaatcagaagatcagcgccaacattgatactcctgagggcggcttcgacgccatcatgcaggctgccgtctgcaaggagaagatcgggtggaggaacgacagcctccacctgctcgtgttcgtgagcgacgccgacagccactttgggatggactccaagctggccggcatcgtgatccccaacgacgggctgtgtcacctcgattccaagaacgagtacagcatgagcaccgtgctggagtaccccaccattgggcagctcattgataagctcgtgcagaacaacgtcctgctgatctttgcagtgacacaggagcaggtgcacctgtacgagaattacgcaaagctcatccccggagccactgtgggcctcctgcagaaggactccgggaacatcctccagctcatcatctccgcctacgaggagctgaggagcgaggtggagctcgaggtcctcggggacaccgagggcctcaacctgagctttaccgccatctgcaacaacggaactctcttccagcaccagaagaagtgctctcacatgaaggtgggcgacaccgcctccttcagcgtgaccgtgaacatccctcactgtgagcggcggagccgccacatcatcatcaagcccgtggggctcggggacgccctggagctcctggtgtcccctgagtgtaactgcgactgccagaaggaggtcgaggtgaacagctctaagtgccaccacggcaacgggagcttccagtgcggggtgtgcgcatgccaccccggccacatggggcctcgctgcgagtgcggcgaggacatgctgtctaccgacagctgcaaggaggcccctgaccaccctagctgctctggccgcggagactgctactgcggccagtgcatctgccacctgtccccttacgggaacatttacgggccctactgccagtgtgataacttttcctgcgtgcggcacaagggcctgctgtgcggaggaaatggcgactgcgactgcggcgagtgcgtctgtcgcagcggctggaccggggagtactgcaactgcactacttccactgacagctgtgtcagcgaggacggggtgctctgttctggccgcggggactgcgtctgcggcaagtgcgtgtgcactaatccaggggcctccgggcccacctgcgagcggtgtcccacctgcggggacccttgcaacagcaagaggtcctgcatcgagtgccacctgtccgccgccggacaggcacgcgaggagtgcgtcgataagtgtaagctcgccggagctacaattagcgaggaggaggacttctccaaggacgggagcgtgagctgctccctccagggagagaacgagtgcctgatcactttcctcatcaccactgataacgagggaaagacaatcattcactctatcaacgagaaggattgtcccaagcccccaaacattcccatgatcatgctgggagtgtccctggcaatcctgctgatcggagtcgtgctgctctgcatctggaagctgctcgtctccttccacgaccgcaaggaggtcgcaaagtttgaggccgagcggtctaaggccaagtggcagacagggaccaatcctctctaccgcgggtctacttctaccttcaagaacgtgacttacaagcacagggagaagcagaaggtggacctctccaccgattgctaagcccctccggggcaaacaccattgtcacactccagcctcggtggcctagcttcttgccccttgggcccaaacaccattgtcacactccatccccccagcccctcctccccttcctgcacccgtaccccccaaacaccattgtcacactccagtggtctttgaataaagtctgagtgggcggc

SEQ ID NO: 176-196 - skipped (21 entries)

SEQ ID NO: 197 - RNA, 47 nt, unidentified
  source 1..47: mol_type = unassigned RNA
gggaaataagagagaaaagaagagtaagaagaaatataagagccacc

SEQ ID NO: 198 - RNA, 142 nt, unidentified; identical to SEQ ID NO: 111
  source 1..142: mol_type = unassigned RNA

SEQ ID NO: 199 - RNA, 164 nt, unidentified; identical to SEQ ID NO: 113
  source 1..164: mol_type = unassigned RNA

SEQ ID NO: 200 - RNA, 87 nt, unidentified
  source 1..87: mol_type = unassigned RNA
gacagtgcagtcacccataaagtagaaagcactactaacagcactggagggtgtagtgtttcctactttatggatgagtgtactgtg

SEQ ID NO: 201 - RNA, 23 nt, unidentified
  source 1..23: mol_type = unassigned RNA
tgtagtgtttcctactttatgga

SEQ ID NO: 202 - RNA, 23 nt, unidentified
  source 1..23: mol_type = unassigned RNA
tccataaagtaggaaacactaca

SEQ ID NO: 203 - RNA, 21 nt, unidentified
  source 1..21: mol_type = unassigned RNA
cataaagtagaaagcactact

SEQ ID NO: 204 - RNA, 21 nt, unidentified
  source 1..21: mol_type = unassigned RNA
agtagtgctttctactttatg

SEQ ID NO: 205 - RNA, 85 nt, unidentified
  source 1..85: mol_type = unassigned RNA
cgctggcgacgggacattattacttttggtacgcgctgtgacacttcaaactcgtaccgtgagtaataatgcgccgtccacggca

SEQ ID NO: 206 - RNA, 22 nt, unidentified
  source 1..22: mol_type = unassigned RNA
tcgtaccgtgagtaataatgcg

SEQ ID NO: 207 - RNA, 22 nt, unidentified
  source 1..22: mol_type = unassigned RNA
cgcattattactcacggtacga

SEQ ID NO: 208 - RNA, 21 nt, unidentified
  source 1..21: mol_type = unassigned RNA
cattattacttttggtacgcg

SEQ ID NO: 209 - RNA, 21 nt, unidentified
  source 1..21: mol_type = unassigned RNA
cgcgtaccaaaagtaataatg

SEQ ID NO: 210 - skipped

SEQ ID NO: 211 - DNA, 126 bp, unidentified
  source 1..126: mol_type = unassigned DNA
  modified_base 126: mod_base = OTHER; note = inverted deoxythymidine
  misc_feature 1..125: note = RNA
  misc_feature 126: note = DNA
aaaaaaaaaaaaaaaaaaaaaaaaaaaaaaaaaaaaaaaaaaaaaaaaaaaaaaaaaaaaaaaaaaaaaaaaaaaaaaaaaaaaaaaaaaaaaaaaaaaatctagaaaaaaaaaaaaaaaaaaaat

SEQ ID NO: 212 - RNA, 22 nt, unidentified
  source 1..22: mol_type = unassigned RNA
caaacaccattgtcacactcca

SEQ ID NO: 213-219 - skipped (7 entries)

SEQ ID NO: 220 - RNA, 133 nt, unidentified
  source 1..133: mol_type = unassigned RNA
gctggagcctcggtggccatgcttcttgccccttgggcctccccccagcccctcctccccttcctgcacccgtaccccctccataaagtaggaaacactacagtggtctttgaataaagtctgagtgggcggc

SEQ ID NO: 221 - RNA, 22 nt, unidentified
  source 1..22: mol_type = unassigned RNA
cctctgaaattcagttcttcag

SEQ ID NO: 222 - RNA, 22 nt, unidentified
  source 1..22: mol_type = unassigned RNA
tgagaactgaattccatgggtt

SEQ ID NO: 223 - RNA, 22 nt, unidentified
  source 1..22: mol_type = unassigned RNA
ctcctacatattagcattaaca

SEQ ID NO: 224 - RNA, 23 nt, unidentified
  source 1..23: mol_type = unassigned RNA
ttaatgctaatcgtgataggggt

SEQ ID NO: 225 - RNA, 22 nt, unidentified
  source 1..22: mol_type = unassigned RNA
ccagtattaactgtgctgctga

SEQ ID NO: 226 - RNA, 22 nt, unidentified
  source 1..22: mol_type = unassigned RNA
tagcagcacgtaaatattggcg

SEQ ID NO: 227 - RNA, 21 nt, unidentified
  source 1..21: mol_type = unassigned RNA
caacaccagtcgatgggctgt

SEQ ID NO: 228 - RNA, 22 nt, unidentified
  source 1..22: mol_type = unassigned RNA
tagcttatcagactgatgttga

SEQ ID NO: 229 - skipped

SEQ ID NO: 230 - RNA, 22 nt, unidentified
  source 1..22: mol_type = unassigned RNA
cgtgtatttgacaagctgagtt

SEQ ID NO: 231 - RNA, 22 nt, unidentified
  source 1..22: mol_type = unassigned RNA
tggctcagttcagcaggaacag

SEQ ID NO: 232 - RNA, 22 nt, unidentified
  source 1..22: mol_type = unassigned RNA
tgcctactgagctgatatcagt

SEQ ID NO: 233 - RNA, 21 nt, unidentified
  source 1..21: mol_type = unassigned RNA
ttcacagtggctaagttccgc

SEQ ID NO: 234 - RNA, 22 nt, unidentified
  source 1..22: mol_type = unassigned RNA
agggcttagctgcttgtgagca

SEQ ID NO: 235 - RNA, 141 nt, unidentified
  source 1..141: mol_type = unassigned RNA
tgataataggctggagcctcggtggccatgcttcttgccccttgggcctccccccagcccctcctccccttcctgcacccgtaccccccgcattattactcacggtacgagtggtctttgaataaagtctgagtgggcggc

SEQ ID NO: 236 - RNA, 119 nt, unidentified; identical to SEQ ID NO: 107
  source 1..119: mol_type = unassigned RNA

SEQ ID NO: 237 - RNA, 142 nt, unidentified
  source 1..142: mol_type = unassigned RNA
tgataataggctggagcctcggtggccatgcttcttgccccttgggcctccccccagcccctcctccccttcctgcacccgtaccccctccataaagtaggaaacactacagtggtctttgaataaagtctgagtgggcggc

SEQ ID NO: 238 - skipped

SEQ ID NO: 239 - RNA, 23 nt, unidentified
  source 1..23: mol_type = unassigned RNA
ttaatgctaattgtgataggggt

SEQ ID NO: 240 - RNA, 23 nt, unidentified
  source 1..23: mol_type = unassigned RNA
acccctatcacaattagcattaa

SEQ ID NO: 241 - RNA, 188 nt, unidentified
  source 1..188: mol_type = unassigned RNA
tgataatagtccataaagtaggaaacactacagctggagcctcggtggccatgcttcttgccccttgggcctccataaagtaggaaacactacatccccccagcccctcctccccttcctgcacccgtaccccctccataaagtaggaaacactacagtggtctttgaataaagtctgagtgggcggc

SEQ ID NO: 242 - RNA, 140 nt, unidentified
  source 1..140: mol_type = unassigned RNA
tgataataggctggagcctcggtggccatgcttcttgccccttgggcctccccccagcccctcctccccttcctgcacccgtacccccagtagtgctttctactttatggtggtctttgaataaagtctgagtgggcggc

SEQ ID NO: 243 - RNA, 182 nt, unidentified
  source 1..182: mol_type = unassigned RNA
tgataatagagtagtgctttctactttatggctggagcctcggtggccatgcttcttgccccttgggccagtagtgctttctactttatgtccccccagcccctcctccccttcctgcacccgtacccccagtagtgctttctactttatggtggtctttgaataaagtctgagtgggcggc

SEQ ID NO: 244 - RNA, 184 nt, unidentified
  source 1..184: mol_type = unassigned RNA
tgataatagagtagtgctttctactttatggctggagcctcggtggccatgcttcttgccccttgggcctccataaagtaggaaacactacatccccccagcccctcctccccttcctgcacccgtacccccagtagtgctttctactttatggtggtctttgaataaagtctgagtgggcggc

SEQ ID NO: 245 - RNA, 142 nt, unidentified
  source 1..142: mol_type = unassigned RNA
tgataataggctggagcctcggtggccatgcttcttgccccttgggcctccccccagcccctcctccccttcctgcacccgtacccccacccctatcacaattagcattaagtggtctttgaataaagtctgagtgggcggc

SEQ ID NO: 246 - RNA, 188 nt, unidentified
  source 1..188: mol_type = unassigned RNA
tgataatagacccctatcacaattagcattaagctggagcctcggtggccatgcttcttgccccttgggccacccctatcacaattagcattaatccccccagcccctcctccccttcctgcacccgtacccccacccctatcacaattagcattaagtggtctttgaataaagtctgagtgggcggc

SEQ ID NO: 247 - RNA, 188 nt, unidentified
  source 1..188: mol_type = unassigned RNA
tgataatagacccctatcacaattagcattaagctggagcctcggtggccatgcttcttgccccttgggcctccataaagtaggaaacactacatccccccagcccctcctccccttcctgcacccgtacccccacccctatcacaattagcattaagtggtctttgaataaagtctgagtgggcggc

SEQ ID NO: 248 - RNA, 142 nt, unidentified
  source 1..142: mol_type = unassigned RNA
tgataatagtccataaagtaggaaacactacagctggagcctcggtggccatgcttcttgccccttgggcctccccccagcccctcctccccttcctgcacccgtacccccgtggtctttgaataaagtctgagtgggcggc

SEQ ID NO: 249 - RNA, 142 nt, unidentified
  source 1..142: mol_type = unassigned RNA
tgataataggctggagcctcggtggctccataaagtaggaaacactacacatgcttcttgccccttgggcctccccccagcccctcctccccttcctgcacccgtacccccgtggtctttgaataaagtctgagtgggcggc

SEQ ID NO: 250 - RNA, 142 nt, unidentified
  source 1..142: mol_type = unassigned RNA
tgataataggctggagcctcggtggccatgcttcttgccccttgggcctccataaagtaggaaacactacatccccccagcccctcctccccttcctgcacccgtacccccgtggtctttgaataaagtctgagtgggcggc

SEQ ID NO: 251 - RNA, 70 nt, unidentified
  source 1..70: mol_type = unassigned RNA
gggaaataagagtccataaagtaggaaacactacaagaaaagaagagtaagaagaaatataagagccacc

SEQ ID NO: 252 - RNA, 70 nt, unidentified
  source 1..70: mol_type = unassigned RNA
gggaaataagagagaaaagaagagtaatccataaagtaggaaacactacagaagaaatataagagccacc

SEQ ID NO: 253 - RNA, 70 nt, unidentified
  source 1..70: mol_type = unassigned RNA
gggaaataagagagaaaagaagagtaagaagaaatataatccataaagtaggaaacactacagagccacc

SEQ ID NO: 254 - RNA, 23 nt, unidentified
  source 1..23: mol_type = unassigned RNA
acccctatcacaattagcattaa

SEQ ID NO: 255 - RNA, 181 nt, unidentified
  source 1..181: mol_type = unassigned RNA
tgataatagagtagtgctttctactttatggctggagcctcggtggccatgcttcttgccccttgggccagtagtgctttctactttatgtccccccagcccctctccccttcctgcacccgtacccccagtagtgctttctactttatggtggtctttgaataaagtctgagtgggcggc

SEQ ID NO: 256 - RNA, 142 nt, unidentified
  source 1..142: mol_type = unassigned RNA
tgataataggctggagcctcggtggccatgcttcttgccccttccataaagtaggaaacactacatgggcctccccccagcccctcctccccttcctgcacccgtacccccgtggtctttgaataaagtctgagtgggcggc

SEQ ID NO: 257 - RNA, 142 nt, unidentified
  source 1..142: mol_type = unassigned RNA
tgataataggctggagcctcggtggccatgcttcttgccccttgggcctccccccagtccataaagtaggaaacactacacccctcctccccttcctgcacccgtacccccgtggtctttgaataaagtctgagtgggcggc

SEQ ID NO: 258 - RNA, 142 nt, unidentified
  source 1..142: mol_type = unassigned RNA
tgataataggctggagcctcggtggccatgcttcttgccccttgggcctccccccagcccctcctccccttctccataaagtaggaaacactacactgcacccgtacccccgtggtctttgaataaagtctgagtgggcggc

SEQ ID NO: 259 - RNA, 142 nt, unidentified
  source 1..142: mol_type = unassigned RNA
tgataataggctggagcctcggtggccatgcttcttgccccttgggcctccccccagcccctcctccccttcctgcacccgtacccccgtggtctttgaataaagttccataaagtaggaaacactacactgagtgggcggc

SEQ ID NO: 260 - RNA, 164 nt, unidentified
  source 1..164: mol_type = unassigned RNA
tgataatagtccataaagtaggaaacactacagctggagcctcggtggcctagcttcttgccccttgggcctccccccagcccctcctccccttcctgcacccgtaccccccgcattattactcacggtacgagtggtctttgaataaagtctgagtgggcggc

SEQ ID NO: 261 - RNA, 119 nt, unidentified; identical to SEQ ID NO: 108
  source 1..119: mol_type = unassigned RNA

SEQ ID NO: 262 - RNA, 141 nt, unidentified; identical to SEQ ID NO: 112
  source 1..141: mol_type = unassigned RNA

SEQ ID NO: 263 - RNA, 188 nt, unidentified; identical to SEQ ID NO: 114
  source 1..188: mol_type = unassigned RNA

SEQ ID NO: 264 - RNA, 142 nt, unidentified
  source 1..142: mol_type = unassigned RNA
tgataatagtccataaagtaggaaacactacagctggagcctcggtggcctagcttcttgccccttgggcctccccccagcccctcctccccttcctgcacccgtacccccgtggtctttgaataaagtctgagtgggcggc

SEQ ID NO: 265 - RNA, 142 nt, unidentified
  source 1..142: mol_type = unassigned RNA
tgataataggctggagcctcggtggctccataaagtaggaaacactacactagcttcttgccccttgggcctccccccagcccctcctccccttcctgcacccgtacccccgtggtctttgaataaagtctgagtgggcggc

SEQ ID NO: 266 - RNA, 142 nt, unidentified
  source 1..142: mol_type = unassigned RNA
tgataataggctggagcctcggtggcctagcttcttgccccttgggcctccataaagtaggaaacactacatccccccagcccctcctccccttcctgcacccgtacccccgtggtctttgaataaagtctgagtgggcggc

SEQ ID NO: 267 - RNA, 142 nt, unidentified
  source 1..142: mol_type = unassigned RNA
tgataataggctggagcctcggtggcctagcttcttgccccttgggcctccccccagcccctcctccccttcctgcacccgtacccccacccctatcacaattagcattaagtggtctttgaataaagtctgagtgggcggc

SEQ ID NO: 268 - RNA, 188 nt, unidentified
  source 1..188: mol_type = unassigned RNA
tgataatagacccctatcacaattagcattaagctggagcctcggtggcctagcttcttgccccttgggccacccctatcacaattagcattaatccccccagcccctcctccccttcctgcacccgtacccccacccctatcacaattagcattaagtggtctttgaataaagtctgagtgggcggc

SEQ ID NO: 269 - RNA, 188 nt, unidentified
  source 1..188: mol_type = unassigned RNA
tgataatagacccctatcacaattagcattaagctggagcctcggtggcctagcttcttgccccttgggcctccataaagtaggaaacactacatccccccagcccctcctccccttcctgcacccgtacccccacccctatcacaattagcattaagtggtctttgaataaagtctgagtgggcggc

SEQ ID NO: 270 - skipped

SEQ ID NO: 271 - RNA, 47 nt, unidentified
  source 1..47: mol_type = unassigned RNA
aggaaataagagagaaaagaagagtaagaagaaatataagagccacc

SEQ ID NO: 272 - RNA, 57 nt, unidentified
  source 1..57: mol_type = unassigned RNA
gggaaataagagagaaaagaagagtaagaagaaatataagaccccggcgccgccacc

SEQ ID NO: 273 - RNA, 57 nt, unidentified
  source 1..57: mol_type = unassigned RNA
aggaaataagagagaaaagaagagtaagaagaaatataagaccccggcgccgccacc

SEQ ID NO: 274 - RNA, 47 nt, unidentified
  source 1..47: mol_type = unassigned RNA
gggagatcagagagaaaagaagagtaagaagaaatataagagccacc

SEQ ID NO: 275-299 - skipped (25 entries)

SEQ ID NO: 300 - protein, 8 aa, unidentified
SIINFEKL

SEQ ID NO: 301-369 - skipped (69 entries)

SEQ ID NO: 370 - RNA, 120 nt, unidentified
  source 1..120: mol_type = unassigned RNA
aaaaaaaaaaaaaaaaaaaaaaaaaaaaaaaaaaaaaaaaaaaaaaaaaaaaaaaaaaaaaaaaaaaaaaaaaaaaaaaaaaaaaaaaaaaaaaaaaaaaaaaaaaaaaaaaaaaaaaaa

SEQ ID NO: 371-501 - skipped (131 entries)

SEQ ID NO: 502 - RNA, 100 nt, unidentified
  source 1..100: mol_type = unassigned RNA
aaaaaaaaaaaaaaaaaaaaaaaaaaaaaaaaaaaaaaaaaaaaaaaaaaaaaaaaaaaaaaaaaaaaaaaaaaaaaaaaaaaaaaaaaaaaaaaaaaaa

SEQ ID NO: 503 - RNA, 120 nt, unidentified; identical to SEQ ID NO: 370
  source 1..120: mol_type = unassigned RNA

SEQ ID NO: 504 - RNA, 22 nt, unidentified
  source 1..22: mol_type = unassigned RNA
tgtcagtttgtcaaatacccca

SEQ ID NO: 505 - DNA, 21 bp, unidentified
  source 1..21: mol_type = unassigned DNA
  modified_base 1: mod_base = OTHER; note = phosphate-adenosine
  modified_base 21: mod_base = OTHER; note = inverted deoxythymidine
  misc_feature 1..20: note = RNA
  misc_feature 21: note = DNA
aaaaaaaaaaaaaaaaaaaat
